(19) United States
(12) Patent Application Publication
(10) Pub. No.: US 2006/0079493 A1
(43) Pub. Date: Apr. 13, 2006

(54) Methods for treating genetically- defined proliferative disorders with hsp90 inhibitors

(76) Inventors: Lawrence Fritz, Reache Santa Fe, CA (US); Francis Burrows, Solana Beach, CA (US)

Correspondence Address: BIOTECHNOLOGY LAW GROUP, 527 N HIGHWAY 101, SUITE E, SOLANA BEACH, CA, 92075-1173, US

(21) Appl. No.: 10/469,469

(22) PCT Filed: Mar. 1, 2002
(86) PCT No.: PCT/US02/06518

§ 371 Date: Aug. 27, 2003

Related U.S. Application Data
(60) Provisional application No. 60/272,751, filed on Mar. 1, 2001.

(51) Int. Cl. A61K 31/33; C12Q 1/68; G01N 33/53

(52) U.S. Cl. 514/183; 435/6; 435/7.1

(57) ABSTRACT

The invention relates generally to methods of treating cell proliferative diseases with HSP90 inhibitors and, depending on the specific aspect and embodiment(s) claimed, to the treatment of proliferative diseases that are associated with fusion proteins, e.g., bcrabl, or mutant proteins or cellular protein isoforms, e.g., mutant forms of p53.

### FIELD OF THE INVENTION

[0001] The field of the invention relates to chemotherapeutic treatments of proliferative disorders, including rheumatoid arthritis and neoplasias.

### BACKGROUND OF THE INVENTION

[0002] The following description includes information that may be useful in understanding the present invention. It is not an admission that any of the information provided herein is prior art, or relevant, to the presently claimed inventions, or that any publication specifically or implicitly referenced is prior art.

[0003] The eukaryotic heat shock protein 90s (HSP90s) are ubiquitous chaperone proteins that are involved in folding, activation and assembly of a wide range of proteins, including key proteins involved in signal transduction, cell cycle control and transcriptional regulation. HSP90 proteins are highly conserved in nature (see, e.g., NCBI accession # P07900 (SEQ ID NO: 318) and XM 004515 (SEQ ID NOs: 319 and 320) (human α and β HSP90, respectively), P11499 (SEQ ID NO: 321) (mouse), AAB23369 (SEQ ID NO: 322) (rat), P46633 (SEQ ID NO: 323) (chinese hamster), JC1468 (SEQ ID NO: 324) (chicken), AAF69019 (SEQ ID NO: 325) (fleshfly), AAC21566 (SEQ ID NO: 326) (zebrafish), AAD30275 (SEQ ID NO: 327) (salmon), AAC48718 (SEQ ID NO: 328) (pig), NP 015084 (SEQ ID NO: 329) (yeast), and CAC29071 (SEQ ID NO: 330) (frog).

[0004] Researchers have reported that HSP90 chaperone proteins are associated with important signaling proteins, such as steroid hormone receptors and protein kinases, including many that are implicated in tumorigenesis, e.g., Raf-1, EGFR, v-Src family kinases, Cdk4, and ErbB-2 (Buchner J., 1999, TIBS, 24:136-141; Stepanova, L. et al., 1996, Genes Dev. 10:1491-502; Dai, K. et al., 1996, J. Biol. Chem. 271:22030-4). In vivo and in vitro studies indicate that certain co-chaperones, e.g., Hsp70, p60/Hop/Sti1, Hip, Bag1, HSP40/Hdj2/Hsj1, immunophilins, p23, and p50, may assist HSP90 in its function (Caplan, A., 1999, Trends in Cell Biol., 9: 262-68).

[0005] Ansamycins are antibiotics derived from Streptomyces hygroscopicus which are known to inhibit HSP90s. These antibiotics, e.g., herbimycin A (HA) and geldanamycin (GM), as well as other HSP90 inhibitors such as radicicol, bind tightly to an N-terminal pocket in HSP90 (Stebbins, C. et al., 1997, Cell, 89:239-250). This pocket is highly conserved and has weak homology to the ATP-binding site of DNA gyrase (Stebbins, C. et al., supra; Grenert, J. P. et al., 1997, J. Biol. Chem., 272:23843-50). ATP and ADP have been shown to bind this pocket with low affinity, and HSP90 itself has been shown to have weak ATPase activity (Proromou, C. et al., 1997, Cell, 90: 65-75; Panaretou, B. et al., 1998, EMBO J, 17: 4829-36). In vitro and in vivo studies have demonstrated that occupancy of the N-terminal pocket of HSP90 by ansamycins and other inhibitors alters HSP90 function and inhibits client protein folding. At high concentrations, ansamycins and other HSP90 inhibitors have been shown to prevent binding of client protein substrates to HSP90 (Scheibel, T., H. et al., 1999, Proc. Natl. Acad. Sci. USA 96:1297-302; Schulte, T. W. et al., 1995, J. Biol. Chem. 270:24585-8; Whitesell, L., et al., 1994, Proc. Natl. Acad. Sci. USA 91:8324-8328). Ansamycins have also been demonstrated to inhibit the ATP-dependent release of chaperone-associated protein substrates (Schneider, C., L. et al., 1996, Proc. Natl. Acad. Sci. USA, 93:14536-41; Sepp-Lorenzino et al., 1995, J. Biol. Chem. 270:16580-16587), and some of these substrates have been shown to be degraded by a ubiquitin-dependent process in the proteasome (Schneider, C., L., supra; Sepp-Lorenzino, L., et al., 1995, J. Biol. Chem., 270:16580-16587; Whitesell, L. et al., 1994, Proc. Natl. Acad. Sci. USA, 91: 8324-8328).

[0006] This substrate destabilization occurs in tumor and nontransformed cells alike and has been shown to be especially effective on a subset of signaling regulators, e.g., Raf (Schulte, T. W. et al., 1997, Biochem. Biophys. Res. Commun. 239:655-9; Schulte, T. W., et al., 1995, J. Biol. Chem. 270:24585-8), nuclear steroid receptors (Segnitz, B., and U. Gehring. 1997, J. Biol. Chem. 272:18694-18701; Smith, D. F. et al., 1995, Mol. Cell. Biol. 15:6804-12), v-src (Whitesell, L., et al., 1994, Proc. Natl. Acad Sci. USA 91:8324-8328) and certain transmembrane tyrosine kinases (Sepp-Lorenzino, L. et al.,. 1995, J. Biol. Chem. 270:16580-16587) such as EGF receptor (EGFR) and Her2/Neu (Hartmann, F., et al., 1997, Int. J. Cancer 70:221-9; Miller, P. et al., 1994, Cancer Res. 54:2724-2730; Mimnaugh, E. G., et al., 1996, J. Biol. Chem. 271:22796-801; Schnur, R. et al., 1995, J. Med. Chem. 38:3806-3812). The ansamycin-induced loss of these proteins leads to the selective disruption of certain regulatory pathways and results in growth arrest at specific phases of the cell cycle (Muise-Heimericks, R. C. et al., 1998, J. Biol. Chem. 273:29864-72), and apoptsosis of cells so treated (Vasilevskaya, A. et al., 1999, Cancer Res., 59:3935-40).

[0007] Growth arrest of this sort, provided it can be made selective, has important ramifications for the treatment of certain proliferative disorders, including cancer. Whereas cancer treatments have thus far been limited to traditional surgical removal, radiation, and/or chemotherapy, and whereas these procedures have been more or less successful, a need remains to develop additional therapies with increased efficacy and decreased side-effects that can be used alone or in combination with existing therapies. There particularly remains a need for cancer treatments that target specific cancer types. The present invention satisfies these needs and provides related advantages as well.

### SUMMARY OF THE INVENTION

[0008] Applicants report that many proliferative disorders are associated with aberrant proteins that exhibit a dependence on HSP90. In some cases this dependence manifests as a heightened sensitivity to HSP90 inhibitors such that affected cells can be selectively treated using a dosage that is effective against the aberrant cells but which is ineffective or less effective against normal cells. The aberrant proteins may also exhibit increased proteosome-dependent degradation when in the presence of HSP90 inhibitors. While the invention is not limited by mechanism, increased dependence, sensitivity, and/or disposition to preferential degradation may advantageously be used to treat corresponding proliferative diseases according to the methods of the invention.

[0009] Among others, the invention targets two groups of aberrant proteins in particular and the corresponding proliferative disorders they are associated with. Within the first group are fusion proteins generated as a result of non-random chromosomal aberrations (such as translocations, deletions and inversions) that juxtapose parts of the coding sequences of two normal cellular proteins (Rabbitts, T., 1994, Nature 372:143-149). Duplication of genetic material within a chromosome resulting in a augmented or semi-duplicative transcripts is also a possibility. Within the second group are mutants and isoforms of cellular proteins that override, dominate, or otherwise obscure the natural gene products and their function. For example, mutants and isoforms of p53 family proteins and other tumor suppressor gene products can act as dominant-negative inhibitors of the corresponding normal protein in heterozygous tumor cells (Blagosklonny, M., et al, 1995, Oncogene, 11:933-939. Other examples include virally-encoded species of certain kinases, such as v-src and other dominantly-acting mutant oncogene products (Uehara, Y. et al., 1985, supra).

[0010] Accordingly, in a first aspect the invention features a method of treating a patient having a genetically-defined proliferative disease characterized by a non-random chromosomal aberration. This aberration produces or is capable of producing an oncogenic fusion protein. The method in its broadest embodiment includes (a) providing a cell, tissue, or fluid sample of a patient suspected of having a genetically-defined proliferative disease; (b) identifying in the cell, tissue, or fluid sample one or more characteristics indicative of the proliferative disease; and (c) administering to the patient a pharmaceutically effective amount of an HSP90-inhibiting compound.

[0011] The patient may be any organism that can manifest a proliferative disease characterized by an oncogenic fusion protein, which disease is responsive to HSP90 inhibitors. Preferably, but not necessarily, the organism is an animal, more preferably a mammal, and most preferably a human.

[0012] In preferred embodiments, the inhibitory compound is an ansamycin including but not limited to, e.g., geldanamycin, the geldanamycin derivative, 17-AAG, herbimycin A, and/or macbecin. Most preferably, the ansamycin is 17-AAG. These and other ansamycins and methods of preparing them are well-known in the art. See, e.g., U.S. Pat. Nos. 3,595,955, 4,261,989, 5,387,584, and 5,932,566. Although preferably the compound is an ansamycin, the method may make use of any compound, synthetic or nonsynthetic, that can inhibit HSP90. Preferably, the inhibitor binds the ATP-binding site of HSP90, or an HSP90 homolog. Radicicol is a nonsynthetic example of a compound useful in the invention described and claimed herein. Libraries of small molecules, synthetic and/or nonsynthetic exist or can be made according to routine, well-known methods and screened for HSP90 binding and/or inhibitory activity. These molecules with HSP90 binding and/or inhibitory activity are also useful in the methods of the invention.

[0013] In the identifying step of the invention, which is carried out prior to diagnosis where/when there is no previous diagnosis, any technique can be used that can identify or predict a proliferative disorder targetable by HSP90 inhibitors. Especially preferred are antibody-based and nucleic acid hybridization and/or amplification techniques. Immunoprecipitation, western blotting, and immunoblotting are illustrative examples of antibody-based methods. The antibodies may be monoclonal and/or polyclonal. Illustrative examples of nucleic acid hybridization-based techniques involve Southern blotting, northern blotting, and dot-blotting. Illustrative examples of nucleic acid amplification include standard polymerase chain reactions and variations thereof, e.g., reverse transcriptase-PCR (RT-PCR). The latter is especially useful for identifying levels of gene expression. Other techniques such as the ligase chain reaction (LCR) are also well-known and have the ability to distinguish an aberrant gene (and indirectly a protein product produced therefrom) from a normal one, or at least predict genotype and/or phenotype. Other methods of identification include ligand-binding assays and gel-retardation assays that display characteristic binding affinities and/or mobility profiles for normal and variant proteins. Where the fusion protein is also an enzyme, one can establish and/or measure aberrance by enzymatic activity (or lack thereof). Conventional and derivative karyotyping and cytochemical techniques can also be used to identify a proliferative disorder of the invention prior to administration of HSP90-inhibitors. One such method is fluorescent in situ hybridization (FISH).

[0014] In some embodiments, the proliferative disease is a hematopoietic disorder including but not limited to one selected from the group consisting of T or B cell lymphomas, chronic myeloid leukemias (CMLs), acute promyelocytic leukemias (APLs), acute lymphoid or lymphoblastic leukemias (ALLs), acute myeloid leukemias (AMLs), non-Hodgkin lymphomas (NHLs), and chronic myelomonocytic leukemias (CMMLs). In other embodiments, the disease is characterized by a solid tumor, preferably including but not limited to papillary thyroid carcinoma, Ewing's sarcoma, melanoma, liposarcoma, rhabdomyosarcoma, synovial sarcoma. The embodiments are not necessarily mutually exclusive of one another, and treatment of multiple distinct diseases may simultaneously be effected in a given patient, as the invention has broad-spectrum merit against a variety of different proliferative disorders.

[0015] Targeted fusion proteins may contain one or more functional domains or portions thereof, e.g., kinases, DNA binding motifs, etc. Such domains are well-known in the art. FIG. 1 illustrates several types of these domains, and the specific fusion proteins, genes, and diseases they can be associated with.

[0016] Administration may be by a variety of means. In some preferred embodiments, administration is made ex vivo, e.g., removing and treating blood or tissue that is thereafter administered back into the patient. Alternatively, or in combination, administration may be intralesional, e.g., administered to the site of a solid tumor, and/or parenteral. These constitute just some of the many different modes of administration that can be used. Others are described herein.

[0017] In other embodiments, the HSP90-inhibiting compound has an IC₅₀ that is higher (preferably two-fold, more preferably five-fold, and most preferably ten-fold) for cells that do not have characteristics indicative of the proliferative disorder as compared with those cells that do have such characteristics.

[0018] In other embodiments, the patient may be tested pre- and/or post-administration for sensitivity and or effect of one or more HSP90 inhibitors. This may be done in vitro or in vivo.

[0019] Numerous non-random chromosomal aberrations exist that are associated with proliferative disorders. These include but are not limited to chromosomal translocations, inversions, and deletions. Duplications also account for some aberrant chromosomes and aberrant resulting gene products. All aberrations can be targeted in various aspects of the invention. Illustrative examples of specific aberrations include those listed in FIG. 1, which is adapted from Table 1 of Rabbitts, Nature 372:143-149 (1994), and others including but not limited to: inv14 (q11; q32), t(9; 22)(q34; q11), t(1; 19)(q23; p13.3), t(17; 19)(q22; p13), t(15; 17)(q21-q11-22), t(11; 17)(q23; q21.1), t(4; 11)(q21; q23), t(9; 11)(q21; q23), t(11; 19)(q23; p13), t(X; 11)(q13; q23), t(1; 11)(p32; q23), t(6; 11)(q27; q23), t(11; 17)(q23; q21), t(8; 21)(q22; q22), t(3; 21)(q26; q22), 5(16; 21)(p11; q22), t(6; 9)(p23; q34), 9; 9?, t(4; 16)(q26; p13), inv(2; 2)(p13; p11.2-14), inv(16)(p13q22), t(5; 12)(q33; p13), t(2; 5)(2p23; q35), t(9:12)(q34:p13), del(12p), t(9;22),+8,+Ph,i(17q), t(15;17)(q22;q12), t(11;17)(q23;q12), t(16:16)(p13;q22), inv(16)(p13;q22), t(9; 11)(p22;q23), t(1;22)(p13;q13), t(3;3)(q21;q26), inv(3)(q21q26), t(3;5)(q21;q31), t(3;5)(q25;q34), t(7;11)(p15;p15), t(8;16)(p11;p13), t(9;12)(q34;p13), t(12;22)(p13;q13), del(5q), del(7q), del(20q), t(11q23), t(12;21)(p13;q22), t(5;12)(q31;p13), t(1;12)(q25;p13), t(12;15)(p13;q25), t(1;12)(q21;p13), t(12;21)(q13;p32), and t(5;7)(q33;q11.2). These are merely a sampling of the many chromosomal aberrations well-known in the art that give rise to particular proliferative disorders treatable according to the invention. For these and others, see, e.g., the National Center for Biotechnology Information (NCBI) databases, including, e.g., the Online Mendelian Inheritance in Man (OMIM) database and related links to nucleotide and protein sequences. For purposes of the present invention, the underlying genetic sequences affected are for the most part known and/or may be deduced using techniques routine in the art.

[0020] Targeted in particularly preferred embodiments of the invention are chromosomal aberrations corresponding to t(9; 22)(q34; q11) that give rise to bcr-abl fusion proteins, chronic myelogenous leukemia (CML) and, in some cases, acute lymphoid or lymphoblastic leukemia (for ALL, see, e.g., Erikson et al., Heterogeneity of chromosome 22 breakpoint in Philadelphia-positive (Ph+) acute lymphocytic leukemia, Proc. Nat. Acad. Sci. 83: 1807-1811 (1986))).

[0021] In a second aspect, the invention features a method of treating cancerous cells in a heterogeneous population of cells. The heterogeneous population includes both cancerous and noncancerous cells, and the cancerous cells are further characterized by fusion proteins that are not produced in the noncancerous cells. The method includes administering to the heterogeneous population a pharmaceutically effective amount of an HSP90-inhibiting compound. The population may be tested by separation of samples from each population into separate subpopulations, cancerous or noncancerous, e.g., where cultured cells of each are tested in parallel for response and/or susceptibility to an HSP90-inhibitor or candidate inhibitor molecule. Alternatively, the population may be mixed, e.g., in an ex vivo procedure in which cells of a patient, e.g., blood, are treated and administered back to the patient or to another individual. This method otherwise tracks the various described and/or claimed embodiments and/or combinations of embodiments of the first aspect.

[0022] In a third aspect, the invention features a method of treating a patient having a proliferative disease associated with a mutant protein or cellular protein isoform dependent on HSP90, or which disease is otherwise sensitive to HSP90 inhibitors. The method includes (a) providing a cell, tissue, or fluid sample of a patient suspected of having said proliferative disease; (b) identifying in the cell, tissue, or fluid sample one or more characteristics indicative of a mutant or cellular protein isoform; and (c) administering to the patient a pharmaceutically effective amount of an HSP90-inhibiting compound.

[0023] In preferred embodiments, the mutant protein or cellular protein isoform is selected from the group consisting of src, RET, p53, p51, p63, and p73. Most preferably selected are isoforms of p53 selected from N239S, C176R, and R213*, Y236delta, C174Y, M133T, G245D, E258K, 1-293delta, G245C, R248W, E258K, R282W, R175H, R280K, V143A, R175H, P177S, H178P, H179R, R181P, 238-9delta, G245S, G245D, M246R, R248Q, R249S, R273H, R273C, R273L, and D281Y.

[0024] In another preferred embodiment, the proliferative disease to be treated is rheumatoid arthritis.

[0025] In some embodiments, the mutant protein or cellular protein isoform may give rise to a dominant negative phenotype In other embodiments, the mutant or cellular protein isoform may give rise to a dominant positive mutant. In either embodiment, the patient may be heterozygous for the normal cellular gene. Other embodiments track those listed for the preceding aspects.

[0026] In a fourth aspect, the invention features a method of selectively treating cells that express a mutant protein or cellular protein isoform associated with a proliferative disorder and which mutant/isoform is dependent on HSP90, or which disease is otherwise sensitive to HSP90 inhibitors. The method includes (a) providing a population of cells in which at least some of the population express a mutant protein or cellular protein isoform that is dependent on HSP90 or which are otherwise sensitive to HSP90 inhibitors. The method further includes administering to the population a pharmaceutically effective amount of an HSP90-inhibiting compound. The embodiments for this aspect may otherwise track preceding embodiments.

[0027] The foregoing aspects contemplate treatment of existing cell proliferative disorders. It is expected that the invention may also find use in prophylactic prevention of various proliferative disorders of the invention. Further, and where appropriate, each of the embodiments discussed above and different combinations thereof, including subgenus and sub-Markush groups, may cross-apply to each of the different aspects of the invention. Further, where sequence listings are provided, the invention may in some aspects contemplate subsequences of the primary sequence listings. Any subsequence within such primary listing is also contemplated for the invention, as well as all allelic variants, and mutant variants and isoforms thereof, as well as corresponding homologs from other organisms and species. Sequences contiguous with and/or in addition to the listed sequences and their above equivalents are also contemplated.

[0028] Advantages of the invention include broad-acting treatment or prophylaxis directed to a variety of different proliferative disorders. Other advantages include the efficient and rapid diagnosis and care of patients suffering from proliferative disorders, with minimal apparent adverse effects. Still other advantages, aspects, and embodiments will be apparent from the figures, the detailed description, and the claims.

### BRIEF DESCRIPTION OF THE DRAWINGS

[0029] FIG. 1 illustrates various genetically defined diseases characterized by non-random chromosomal aberrations that give rise to oncogenic fusion proteins. These illustrative aberrations, diseases, and fusion proteins are targeted in various embodiments of the invention. Other targeted aberrations, diseases, and fusion proteins may be found in the specification and in sources commonly known in the art, e.g., the NCBI and GenBank databases, and journal literature.

### DETAILED DESCRIPTION OF THE INVENTION

Definitions

[0030] As used herein and in the claims the following terms have the following meanings:

[0031] A “genetically-defined disease” is one with a basis in DNA. Genetically defined diseases of the invention include “cell proliferative disorders” wherein unwanted cell proliferation of one or more subset(s) of cells in a multicellular organism occurs, resulting in harm, for example, pain or decreased life expectancy to the organism. “Cell proliferative disorders” refer to disorders wherein unwanted cell proliferation of one or more subset(s) of cells in a multicellular organism occurs, resulting in harm, for example, pain or decreased life expectancy to the organism. Cell proliferative disorders include, but are not limited to, cancers, tumors, benign tumors, blood vessel proliferative disorders, autoimmune disorders and fibrotic disorders. These disorders are not necessarily independent. For example, fibrotic disorders may be related to, or overlap with, blood vessel disorders, e.g., atherosclerosis (which is characterized herein as a blood vessel disorder that is associated with the abnormal formation of fibrous tissue).

[0032] A “non-random chromosomal aberration” is one that occurs with a nonrandom frequency or is selected for in a population of individuals. Chromosomal aberrations of the invention include translocations, i.e., relocation of a fragment of one chromosome onto another chromosome; inversions, i.e., wherein pieces of a chromosome rotate within the same chromosome, and deletions, i.e., wherein fragments of a chromosome are lost thereby juxtaposing pieces of DNA that previously did not reside immediately beside each other.

[0033] An “oncogenic fusion protein” is a protein that is non-natural in and of itself but that may contain one or more pieces of other proteins that may or may not naturally occur within a cell. The fusion protein functions by improperly stimulating cell growth, directly or indirectly. In the context of the invention, the term is also associated with a cellular proliferative disease and is preferably encoded by a nucleic acid found in the cell, e.g., as part of a non-random chromosomal aberration. An oncogenic fusion protein may contain domains or portions thereof, e.g. kinases and/or DNA binding proteins that are well known in the art, or else predicted from their structure to behave as such.

[0034] A “fusion” may relate to, as appropriate to a given context, a fusion chromosome, an abnormal mRNA transcribed from the fused portion of the chromosome, or a polypeptide product translated from the abnormal mRNA that is transcribed from the fusion chromosome. These fusions may result from chromosomal deletions, insertions, and/or translocations. Domains or portions of different genes and gene products are frequently, although not necessarily always, brought together as a consequence of the fusion event. For example, an intragenic deletion can result in an intragenic fusion and give rise to an abnormal protein lacking a component from a second gene. More frequently it occurs that two genes or portions thereof are juxtaposed more or less, transcribed together as a single transcript, and translated together as a fusion protein bearing contributions from multiple genes or other chromomosal DNA pieces. In such fusions, reading frames can be preserved, e.g., as in preserved functional domains or portions thereof coming from two or more different genes, or else the reading frame can be disrupted, e.g., as in the case of a “missense” or “nonsense” event as these terms are known in the art.

[0035] By “providing a cell, tissue, or fluid sample of a patient suspected of having said genetically-defined disease” and “identifying one or more characteristics indicative of said disease in or on said cell, tissue, or fluid sample” can mean, although is not limited to the situation where, the sample is withdrawn from the patient in order to perform the analysis or analyses. Many invasive and noninvasive procedures exist, e.g., NMR, ultrasound and other imaging techniques, that can be used to diagnose, at least in part, an illness and its cause. For example, “tagged” antibodies or other ligands with affinity for a fusion protein or chromosomal aberrancy or aberrancy product of the invention can be used to make the diagnosis and/or assist in treatment according to methods of the invention.

[0036] “Characteristics indicative of said disease” may embrace phenotypes or genotypes and may be measured qualitatively or quantitatively by a variety of techniques. The characteristics may be observed with the naked eye or else through the assistance of a machine or other diagnostic technique(s). Exemplary techniques of measurement include but are not limited to immunoreactivity and/or precipitation, PCR, LCR, karyotyping, and fluorescence activated cell sorting (“FACS)” as those terms are known and understood in the art.

[0037] “Administering” can be by direct means, e.g., intralesional or by parenteral or peripheral administration to a patient, or else by indirect means, e.g., as by withdrawing a patient's cells, treating them, and then re-introducing them back into the patient. The latter constitutes an “ex vivo” technique.

[0038] An “HSP90-inhibiting compound” is one that disrupts the expression, structure, and/or function of an HSP90 chaperone protein and/or a protein that is dependent on HSP90. HSP90 proteins are highly conserved in nature (see, e.g., NCBI accession #'s P07900 and XM 004515 (human α and β HSP90, respectively), P11499 (mouse), AAB2369 (rat), P46633 (chinese hamster), JC1468 (chicken), AAF69019 (flesh fly), AAC21566 (zebrafish), AAD30275 (salmon), O02075 (pig), NP 015084 (yeast), and CAC29071 (frog). There are thus many different HSP90s, all with anticipated similar effect and similar inhibition capabilities. The HSP90 inhibitor used in the methods of the invention may be specifically directed against an HSP90 of the specific host patient or may be identified based on reactivity against an HSP90 homolog from a different species, or an artificial HSP90 variant. The inhibitors used may be ring-structured antibiotics, e.g., benzoquinone ansamycins, or other types of molecules, e.g., antisense nucleic acids and molecules such as radicicol.

[0039] An “ansamycin” includes but is not limited to geldanamycin, 17-AAG, herbimycin A, and macbecin. The specific ansamycin 17-AAG stands for 17-allylamino-17-demethoxygeldanamycin. This and other ansamycins that can be used are well-known in the art. See, e.g., U.S. Pat. Nos. 3,595,955, 4,261,989, 5,387,584, and 5,932,566. Ansamycins may be synthetic, naturally-occurring, or else derivatives of naturally occurring ansamycins that are prepared using standard chemical derivatization techniques.

[0040] A “pharmaceutically effective amount” means an amount which is capable of providing a therapeutic or prophylactic effect. The specific dose of compound administered according to this invention to obtain therapeutic and/or prophylactic effects will, of course, be determined by the particular circumstances surrounding the case, including, for example, the specific compound administered, the route of administration, the condition being treated, the individual being treated, and the tissue or cell type targeted (or not targeted). A typical daily dose (administered in single or divided doses) will contain a dosage level of from about 0.01 mg/kg to about 100 and more preferaby 50 mg/kg of body weight of an active compound of this invention. Preferred daily doses generally will be from about 0.05 mg/kg to about 20 mg/kg and ideally from about 0.1 mg/kg to about 10 mg/kg.

[0041] A preferred therapeutic effect is the inhibition to some extent of the growth of cells causing or contributing to a cell proliferative disorder. A therapeutic effect will also normally, but need not, relieve to some extent one or more of the symptoms of a cell proliferative disorder other than cell growth or size of cell mass. In reference to the treatment of a cancer, a therapeutic effect refers to one or more of the following: 1) reduction in the number of cancer cells; 2) reduction in tumor size; 3) inhibition (i.e., slowing to some extent, preferably stopping) of cancer cell infiltration into peripheral organs; 3) inhibition (i.e., slowing to some extent, preferably stopping) of tumor metastasis; 4) inhibition, to some extent, of tumor growth; and/or 5) relieving to some extent one or more of the symptoms associated with the disorder.

[0042] In reference to the treatment of a cell proliferative disorder other than a cancer, a therapeutic effect refers to either: 1) the inhibition, to some extent, of the growth of cells causing the disorder; 2) the inhibition, to some extent, of the production of factors (e.g., growth factors) causing the disorder; and/or 3) relieving to some extent one or more of the symptoms associated with the disorder.

[0043] With respect to viral infections, the preferred therapeutic effect is the inhibition of a viral infection. More preferably, the therapeutic effect is the destruction of cells which contain the virus.

[0044] A “cancer” refers to one or more various types of benign or malignant neoplasms. In the case of the latter, these may invade surrounding tissues and may metastasize to different sites, as defined in Stedman's Medical Dictionary 25th edition (Hensyl ed. 1990).

[0045] The term “IC₅₀” is defined as the concentration of an HSP90 inhibitor required to achieve killing or other growth inhibition of 50% of the cells of a homogenous cell type population, or of a particular cell type, e.g., cancerous versus noncancerous, over a period of time. The IC₅₀ is preferably, although not necessarily, greater for normal cells than for cells exhibiting a proliferative disorder.

[0046] The term “mutant or isoform cellular protein” refers to a variation of a wild-type protein that occurs in a cell and has a particular function. The mutant or isoform cellular protein of the invention preferably associates with or gives rise to a proliferative disorder, e.g., a cancer, whereas the wild-type protein ordinarily does not.

General

[0047] As described and claimed herein, ansamycins and other HSP90 inhibitors can be used to treat two important classes of tumor-promoting (oncogenic) human proteins.

[0048] 1. Oncogenic Fusion Proteins

[0049] The first class of target proteins of the invention are fusion proteins generated as a result of non-random chromosomal aberrations (such as translocations, deletions and inversions) that juxtapose parts of the coding sequences of two normal cellular proteins (Rabbitts, T., 1994, Nature 372:143-149) leading to the lineage-specific expression of a mutant fusion protein that has biological activities derived from both parent proteins (Barr, F, 1998, Nat. Genet. 19:121-124). Without being limiting of the invention, Applicants have discovered that these fusion proteins have a heightened dependence on HSP90 chaperone activity, and/or decreased stability in the presence of HSP90 inhibitors, thus making them selective targets for treatment with HSP90 inhibitors.

[0050] a. Bcr-abl as an Example

[0051] One example of heightened HSP90 dependence and inhibitor sensitivity is observed when chronic myelogenous leukemia (CML) cells harboring the fusion oncoprotein p210-bcr-abl are treated with HSP90 inhibitors. This fusion protein is degraded faster and more completely than wild type c-abl protein (An, W et al, 2000, Cell Growth and Differentiation 11: 355-360). Further experimental evidence that bcr-abl expressing leukemia cells are more sensitive to HSP90 inhibitors than are closely related bcr-abl-negative leukemia lines is found in Honma, Y et al, 1995, Int. J. Cancer 60:685-688, where it is reported that the IC₅₀ of herbimycin A in six bcr-abl expressing leukemia cell lines averaged 29.3 nM as compared to a mean IC₅₀ of 399.3 nM in a panel of four bcr-abl-negative leukemia lines. Illustrative protein and nucleic acid sequences corresponding to embodiments of bcr-abl fusions of the invention include but are not limited to those found in SEQ ID NOs 1-26 and subsequences thereof, which are further discussed below, along with corresponding NCBI accession numbers.

[0052] The normal Bcr gene occupies a region of about 135 kb on chromosome 22. It is expressed as mRNAs of 4.5- and 6.7-kb, which apparently encode for the same cytoplasmic 160-kD protein, and contains 23 exons as well as an unusual inverted repeat flanking the first exon. The BCR protein reportedly contains a unique serine/threonine kinase activity and at least two SH2 binding sites encoded in its first exon and a C-terminal domain that functions as a GTPase activating protein for p21(rac) (Diekmann et al., Nature 351: 400-402 (1991). Chissoe et al., Genomics 27: 67-82 (1995), sequenced the complete BCR gene and greater than 80% of the human ABL gene, which are both involved in the t(9;22) translocation (Philadelphia chromosome) associated with more than 90% of chronic myelogenous leukemia, 25 to 30% of adult and 2 to 10% of childhood acute lymphoblastic leukemia, and rare cases of acute myelogenous leukemia. Comparison of the gene with its cDNA sequence revealed the positions of 23 BCR exons and putative alternative BCR first and second exons. From the sequence of four newly studied Philadelphia chromosome translocations and a review of several other previously sequenced breakpoints, Chissoe et al. found a variety of breakpoints and recombinations sites possible within the genes. Thus, despite the normal chromosomes and genes each being known (9 and 12; bcr and abl), and the fact that combinations of these genes are known to lead to forms of CML and ALL, the precise genetic breakpoint/recombination junctions that lead to these diseases can vary.

[0053] This heterogeneity likely also applies to some non bcr-abl chromosomal aberrations of the invention as well. Nevertheless, because the genes and/or chromosomes involved are known to have a part in the disorders, the disorders are said to be “genetically defined.”

[0054] b. Other Oncogenic Fusion Proteins

[0055] Oncogenic fusion proteins in general are thought to be inherently unstable. To the extent these unstable oncogenic fusion proteins make use of HSP90, they are susceptible of the methods claimed herein. Because the fusion genes and their protein products exert overtly oncogenic activity (Deininger, M et al, 2000, Cancer Res. 60:2049-2055), preferential degradation of these labile proteins induced by HSP90 inhibitors will have therapeutic value in diseases where the fusion protein is expressed. The present invention thus includes treatment of patients with tumors that are dependent upon other oncogenic fusion proteins that arise from non-random genetic aberrations. An illustrative but nonexhaustive list of these tumors is included in FIG. 1, adapted from Table 1 of Rabbitts, T., 1994, Nature 372:143-149. The list may be supplemented by additional information found, e.g., in Rowley, J, 1999, Semin. Hematol. 36:59-72 and other publications known in the art, as well as discussion below.

[0056] Myeloid cancers in particular are within the scope of the invention and include chromosomal abnormalities that give rise to oncogenic fusion proteins that drive the growth of chronic myeloid leukemia (CML), chronic myelomonocytic leukemia (CMML), acute myeloid leukemia (AML), acute promyelocytic leukemia (APL), and acute lymphoblastic leukemia (ALL). The following chromosomal aberrancies give rise to some illustrative fusions implicated in various forms of ALL:
[0057] t(1:19)(q23:p13) Pro-pre-B acute lymphoblastic leukemia
[0058] t(12:21)(p13:q32) Pro-pre-B acute lymphoblastic leukemia
[0059] t(9:22)(q34:q11) B or B-myeloid acute lymphoblastic leukemia
[0060] t(9:12)(q34:p13) Acute B-lymphoblastic leukemia
[0061] del(12p) Acute B-lymphoblastic leukemia
   Specific genes and proteins thereof implicated in various ALL forms include the MLL gene and the TEL gene, which are commonly rearranged in tumors. Rowley, J, supra. Each has numerous fusion partners. ETV6 denotes the name of the TEL gene product. Fusion of TEL/ETV6 to an acyl CoA synthetase, ACS2, results from a t(5;12)(q31;p13) AML event (Yagasaki, F et al, 1999, Genes Chromosomes Cancer 26:192-202); fusion of TEL/ETV6 to ABL-related gene (ARG) results from a t(1;12)(q25;p13) AML event (Iijima, Y et al, 2000, Blood 95:2126-2131); fusion of TEL/ETV6 to the neurotrophin-3 receptor TRKC results from a t(12;15)(p13;q25) AML event and gives rise to congenital fibrosarcoma (Liu, Q et al, 2000, EMBO J. 19:1827-1838, Eguchi, M et al, 1999, Blood 93:1355-1363); fusion of TEL/ETV6 to the aryl hydrocarbon receptor ARNT results from a t(1;12)(q21;p13) event and gives rise to acute myeloblastic leukemia (AML-M2) (Salomon-Nguyen, F et al, 2000, Proc. Natl. Acad. Sci. 97:6757-6762); and fusion of TEL/ETV6 to AML-1, the DNA-binding subunit of the AML-1/CBFb transcription factor results from a (12;21)(q13;p32) event that can give rise to acute lymphoblastic leukemia (ALL, Shurtleff, S A et al, 1995, Leukemia 9:1985-1989) and, in some cases, non-Hodgkin's lymphoma (NHL).

[0062] Another illutrative fusion within the scope of the invention is the EWS/FLI-1 hybrid protein that is the hallmark of Ewing's sarcoma and the primitive neuroectodermal tumor family (Silvany, et al, 2000, Oncogene 19:4523-4530).

[0063] Yet another illustrative family of fusion proteins within the scope of the invention is the group of fusion proteins arising from chromosomal rearrangements involving the RET gene in thyroid cancer (Kolibaba, K, et al, 1997, Biochem. Biophys. Acta 1333:F211-F248). Rearrangements of RET, resulting in juxtaposition of the RET tyrosine kinase domain with one of three 5′ sequences (RET-PTC-1, -2 and -3) generate fusion proteins comprising the kinase domain of RET fused to parts of the genes H4 (RET-PTC-1), R1a of cAMP-dependent protein kinase A (RET-PTC-2) and ELE-1 (RET-PTC-3).

[0064] The scope of the present invention also includes cancers and other proliferative diseases, e.g., rheumatoid arthritus, now known or discovered in the future to be characterized by specific chromosomal aberrations giving rise to fusion proteins.

[0065] In at least some cases, heterogeneity of breakpoints within the affected chromosomes is possible, thus providing for the possibility of many different DNA fusions and amino acid sequence variations than those specifically listed in the SEQ ID NOs provided, and which can also be formed by the chromosomal rearrangements, e.g., translocations, inversions, deletions, insertion/duplications, etc., so designated. For example, many different abl-bcr gene combinations and corresponding fusion proteins can be designated by the t(9; 22)(q34; q11) tranlocation event, and all—not just those listed below—are included within the purview of the designation, t(9;22)(q34;q11).

[0066] Aberrant proteins of the invention, at least in some instances, feature one or more properties of the individual normal parent genes' gene products (normal polypeptide gene product(s), including e.g., functional and structural domains and subportions thereof resulting from transcription and translation of normal parent genes on normal chromosomes) but otherwise lack exact identity and function with the parent genes' protein products. Chromosomal aberrations may give rise to in-frame fusions or frame-shifts, the latter of which can account for missense or nonsense translation of at least a portion of the mRNA, and thereby result in aberrant polypeptide product(s).

[0067] Of the SEQ ID NOs discussed herein, some reflect fusion genes, some reflect fusion gene products, e.g., mRNAs and peptides, and some reflect portions of such entities. Still some others reflect recombination “hot spots” in the normal genes that have a general propensity to form a chromosomal aberration. Each of the above sequences may be useful as diagnostic markers in appropriate embodiments of the invention and/or may be characteristic of a given proliferative disorder (or patient exhibiting such and, accordingly, a candidate for treatment according to some methods of the invention.

[0068] While the specific sequences discussed are predominantly human in origin, it is understood that other animal “homologs” of the corresponding human sequences are known in the art and are intended to be within within the purview of various aspects of the invention. Because HSP90s are also found in plants, plants and plant cells and tissues exhibiting fusion protein products that give rise to undesirable traits may also be treatable in some aspects and embodiments of the invention. The NCBI nucleotide and protein databases are an example of where such sequences can be found. It is also appreciated that the complete human genome and other genomes have been sequenced, and continue to be sequenced at a hight rate, thus facilitating the identity of sequences contiguous with those listed herein and homologs thereto.

[0069] Further, some of the sequences listed herein may contain errors associated with the logistical complexities of compiling such extensive data, and the true sequences should be interpreted to be within the scope of the invention, either literally or under the doctrine of equivalents, as they are known in the art.

[0070] As those of ordinary skill will appreciate, allelic variations and different isotype proteins are also possible for some genes, e.g., the product of differential splicing events in mRNA, and these are likewise considered within the scope of the invention. Further, some of the NCBI and SEQ ID NOs listed below are for wild-type genes, and are included to give an indication of the different chimeric possibilities for the fused counterpart during a chromosomal aberration according to the invention. Should any of the sequences listed below be in error, such should be construed consistent with what is commonly understood in the art—irrespective of how presented in the application.

[0071] c. Further Discussion of Illustrative Chromosomal Aberrancies
[0072] Convention: where two or more SEQ LD NOs are provided per NCBI accession #, peptide(s) shall be listed first where applicable, followed by corresponding mRNA/cDNA and/or genomic sequence as the case may be. The terms “nucleotide” and “nucleotides” are interchangeable with, and may be symbolized by, “nt.”
   t(9; 22)(q34; q11)

[0073] This translocation is generally addressed in FIG. 1. Illustrative embodiments include but are not limited to events comprising the sequences:

[0074] NCBI # S72478, corresponding to SEQ ID NOs 1 and 2, illustrates one aberrant polypeptide/mRNA in a patient having CML and another patient having ALL. The junction for the nucleic acid sequence between the BCR and ABL genes is stated to reside between nucleotides 100 and 101, with 1-100 derived from BCR and 101-140 derived from ABL.

[0075] NCBI #M19695 (SEQ ID NO 3) illustrates a nucleic acid sequence identified from a human myelocytic chimeric bcr/chromosome 9 fusion (CML K562 cell line).

[0076] NCBI #M30829 (SEQ ID NOs 4 and 5) illustrates a partial bcr/abl fusion protein mRNA.

[0077] NCBI #M13096 (SEQ ID NO 6) illustrates a human chimeric bcr/c-abl fusion protein gene characteristic of cell line K562.

[0078] NCBI #M30832 (SEQ ID NOs 7 and 8) corresponds to a human bcr/abl fusion protein, partial cds, clone E3 from cell line EM2.

[0079] NCBI # AJ131466 (SEQ ID NOs 9 and 10) corresponds to a partial human bcr/abl (major breakpoint) fusion peptide and the underlying nucleic acid encoding it. Nucleotides 1-373 are said to derive from exons 11-14 of the bcr gene, and nucleotides 374-997 are said to derive from exons 2-4 of the abl gene.

[0080] NCBI # AF192533 (SEQ ID NOs 11 and 12) corresponds to a partial human bcr/abl (major breakpoint) fusion mRNA. Nucleotides 1-289 are said to come from the bcr gene of chromosome 22 and nucleotides 290-305 from the able gene of chromosome 9.

[0081] NCBI # AF321981 (SEQ ID NO 13) corresponds to a BCR-ABL fusion transcript e15a2 mRNA sequence. This particular fusion is stated to result from results from a translocation between the 3′ portion of the c-ABL oncogene on chromosome 9 and exon 15 of the BCR gene on chromosom22; t(9;22).

[0082] NCBI # M17543 (SEQ ID NO 14) corresponds to at least a portion of a Philadelphia chromosome breakpoint cluster region associated with one embodiment of a bcr abl fusion gene. Nucleotides 1-31 are said to be exon 1 and nucleotides 32-63 are said to be intron A.

[0083] NCBI # M17542 (SEQ ID NOs 15 and 16) corresponds to a human bcr/abl fusion protein mRNA (product of translocation t(22q11; 9q34)), exons 1 and 2. Nucleotides 1-31 are stated to denote exon 1 and nucleotides 32-63 are stated to denote exon 2.

[0084] NCBI # M17541 (SEQ ID NOs 17 and 18) corresponds to a human bcr/abl fusion protein mRNA (product of translocation t(22q11; 9q34)), exons 1 and 2. Nucleotides 1-31 are stated to denote exon 1 and nucleotides 32-63 are stated to denote exon 2.

[0085] NCBI # AB069693 (SEQ ID NOs 19 and 20) denotes a human partial mRNA corresponding to a bcr/abl e8a2 fusion protein. BCR exons 7 (nucleotides 1-53) and 8 (nucleotides 54-194) are joined to ABL intron 1b inverted (nucleotides 195-249) and ABL exon a2 (nucleotides 250-423).

[0086] NCBI # AJ131467 (SEQ ID NOs 21 and 22) correspond to a human partial BCR/ABL chimeric fusion peptide and corresponding mRNA. Nucleotides 1-117 denote exon 1 of the bcr gene, nucleotides 118-193 and 194-298 denote exons 12 and 13 of the bcr gene, and nucleotides 299-472, 473-768, and 769-922 respectively denote exons 24 of the abl gene.

[0087] NCBI # AF113911 (SEQ ID NOs 23 and 24) correspond to a partial BCR-ABL minor breakpoint peptide (BCR-ABL fusion) mRNA. Nucleotides 1-455 are stated to be from chromosome 22 and nucleotides 456-1079 from chromosome 9.

[0088] NCBI # AF251769 (SEQ ID NOs 25 and 26) correspond to a human partial bcr/abl e1-a3 chimeric fusion protein (BCR/ABLe1-a3) mRNA. Nucleotides 1-455 are stated to be from chromosome 22 and nucleotides 456-1079 from chromosome 9.

inv14 (q11; q32)

[0089] This translocation is generally addressed in FIG. 1. Illustrative embodiments include but are not limited to events comprising the sequences:

[0090] NCBI # X82240 (SEQ ID NOs 27 and 28) correspond to at least a portion of an mRNA for the gene TCL1, which is disrupted in aberrations of the type noted.

[0091] NCBI # NM_{—}021966 (SEQ ID NOs 29 and 30) relate to a human T-cell leukemia/lymphoma 1A (TCL1A), mRNA.

[0092] NCBI # X82241 (SEQ ID NO 31) relates to a 5′ portion of a human TCL1 gene. Nucleotides 496-560 are said to correspond to exon 1.

[0093] NCBI # M14198 (SEQ ID NOs 32 and 33) relate to a human chromosome 14 paracentric inversion producing an heavy chain/T-cell receptor J-alpha fusion protein.

[0094] NCBI # X03752 (SEQ ID NOs 34 and 35) relate to a human gene for rearranged Ig V(H) are said to encode the IgVH region (108 aa) and nucleotides 324 to 377 are said to encode 18 amino acids of the TCR-J-alpha protein.

[0095] NCBI # M12071 (SEQ ID NOs 36 and 37) relates to a human Ig heavy-chain V-region gene (VII family) rearranged to T-cell receptor alpha-chain D-J-sp region (IgT) in an inv(14)(q11; q32), SUP-T1 cell line. Nucleotides 121-166 are said to derive from exon 1 of the IgH gene, nucleotides 167-248 from intron 1 of the IgH gene, nucleotides 249-623 from exon 2 of the IgH gene, and nucleotides 624-675 from intron 2 of the IgH gene.

[0096] NCBI # S45947 (SEQ ID NOs 38 and 39) relate to an IgT=T cell specific exon ET-immunoglobulin VH-T cell receptor J alpha fusion [human, T cell lymphoma cell line SUP-T1, mRNA Mutant, 508 nt]. Nucleotides 34-507 are stated to be IgT coding sequence.

[0097] NCBI # S45207 (SEQ ID NOs 40 and 41) relate to an IgT=T cell specific exon ET-exon EX-immunoglobulin VH-T cell receptor J alpha fusion [human, T cell lymphoma cell line SUP-T1, mRNA Mutant, 616 nt]. Nucleotides 130-616 are stated to be IgT coding sequence.

t(1; 19)(q23; p13.3)

[0098] This translocation is generally addressed in FIG. 1. Illustrative embodiments include but are not limited to events comprising the sequences:

[0099] NCBI # M31522 (SEQ ID NOs 42 and 43) relate to a human translocation (t1;19) fusion protein (E2A/PRL) mRNA, 3′ end.]. Nucleotides 1-1653 are stated to encode a portion of an E2A/PRL fusion protein.

t(17; 19)(q22; p13)

[0100] This translocation is generally addressed in FIG. 1. Illustrative embodiments include but are not limited to events comprising the sequences:

[0101] NCBI # M95586 (SEQ ID NOs 44 and 45) relate to a human E2A/HLA fusion protein (E2A/HLF) mRNA, complete cds. Nucleotides 31-1755 are said to be coding sequence.

t(15; 17)(q21-q11-22)

[0102] This translocation is generally addressed in FIG. 1. Illustrative embodiments include but are not limited to events comprising the sequences:

[0103] NCBI # S50916 (SEQ ID NOs 46 and 47) relate to a PML-RAR fusion gene {fusion transcript} [human, mRNA Partial, 1284 nt]. Nucleotides 1-1251 are said to be coding sequence.

[0104] NCBI # M73779 (SEQ ID NOs 48 and 49) relate to a human PML-RAR protein (PML-RAR) mRNA, complete cds; coding sequence: nucleotides 67-2460.

[0105] NCBI # AJ417079 (SEQ ID NOs 50 and 51) relate to a human partial mRNA for PML/RARA fusion protein (PML/RARA gene); Nucleotides 1-109 derive from exon 6 of PML, nucleotides 110-172 from intron 2 of RARA, and nucleotides 173-296 from exon 3 of RARA.

t(11; 17)(q23; q21.1)

[0106] This translocation is generally addressed in FIG. 1. Illustrative embodiments include but are not limited to events comprising the sequences:

[0107] NCBI # AAB29813 (SEQ ID NO 52) relates to a retinoic acid receptor alpha, RAR alpha(PLZF=zinc finger protein, PLZF-RAR alpha isoform A=fusion protein) {translocation} [human, acute promyelocytic leukemia patient, Peptide Mutant, 858 aa].

[0108] NCBI # AAB29814 (SEQ ID NO 53) relates to a PLZF=zinc finger protein (retinoic acid receptor alpha, RAR alpha, RAR alpha 1-PLZF isoform B=fusion protein) {translocation} [human, acute promyelocytic leukemia patient, Peptide Mutant, 277 aa].

t(4; 11)(q21; q23)

[0109] This translocation is generally addressed in FIG. 1. Illustrative embodiments include but are not limited to events comprising the sequences:

[0110] NCBI # L22179 (SEQ ID NOs 54 and 55) relate to a human MLL-AF4 der(11) fusion protein mRNA, complete cds. Nucleotides 5-6940 are said to be coding sequence.

[0111] NCBI # S67825 (SEQ ID NOos 56 and 57) relate to a human ALL1-AF4 fusion protein mRNA, partial cds. Nucleotides 1-585 are said to derive from chromosome 11 and nucleotides 586-832 from chromosome 4.

[0112] NCBI # AF024541 (SEQ ID NOs 58 and 59) relate to a human MLL-AF4 fusion protein mRNA, partial cds. The codons are said to start with nucleotide 3.

[0113] NCBI # AF031404 (SEQ ID NOs 60 and 61) relate to a human MLL-AF4 fusion protein mRNA, partial cds. Nucleotides 1-305 are said to derive from chromosome 11 and nucleotides 306-741 from chromosome 4. Codons begin with nucleotide 3.

[0114] NCBI # L04731 (SEQ ID NO 63) relates to a human translocation T(4:11) of the human ALL-1 gene to chromosome 4.

[0115] NCBI # AF177237 (SEQ ID NOs 64 and 65) relate to human cell-line MV4-11, MLL/AF4 fusion protein (MLL/AF4) mRNA, partial cds. Nucleotides 1-62 derive from exon 6 of the MLL gene on chromosome 11, and nucleotides 63-450 from exon 5 of the AF4 gene on chromosome 4.

[0116] NCBI # AF177236 (SEQ ID NOs 66 and 67) relate to a human A1 MLL/AF4 fusion protein (MLL/AF4) mRNA, partial cds. Nucleotides 1-63 are stated to derive from exon 6 of the MLL gene on chromosome 11, and nucleotides 64-450 from exon 5 of the AF4 gene on chromosome 4.

[0117] NCBI # AF031403 (SEQ ID NO 68) relates to a human MLL/AF4 translocation breakpoint t(4;11)(q21;23). Nucleotides 1-105 are said to derive from exon 5 of MLL, nucleotides 435-508 from exon 6 of MLL, nucleotides 2195-2326 from exon 7 of MLL, nucleotides 2874-2987 from exon 8 of MLL, and nucleotides 3645-6983 from AF4.

[0118] NCBI # AF177238 (SEQ ID NOs 69 and 70) relate to a human A1 AF4-MLL fusion protein (AF4-MLL) mRNA, partial cds. Nucleotides 1-484 are said to derive from exon 3 of AF4 and nucleotides 485-596 from exon 7 of MLL.

[0119] NCBI # AF177239 (SEQ ID NOs 71 and 72) relate to a human cell-line MV4-11 AF4-MLL fusion protein (AF4-MLL) mRNA, partial cds. Nucleotides 1-484 are said to derive from exon 3 of AF4 and nucleotides 485-596 from exon 7 of MLL

[0120] NCBI # AF397907 (SEQ ID NO 73) relates to a human AF4/MLL translocation breakpoint region. Nucleotides 1-437 are said to derive from intron 3 of AF6, nucleotides 440-631 from intron 6 of MLL, and nucleotides 632-747 from exon 7 of MLL. The breakpoint is approximately nucleotide 438-439, which was undetermined due to GC compressions.

[0121] NCBI # AF024543 (SEQ ID NO 74) relates to a human MLL/AF4 translocation breakpoint t(4;11)(q21;q23).

t(9; 11)(q21; q23)

[0122] This translocation is generally addressed in FIG. 1. Illustrative embodiments include but are not limited to events comprising the sequences:

[0123] NCBI # S82034 (SEQ ID NO 75) relates to an MLL-AF9=fusion gene {fusion site} [human, peripheral blood, acute myeloid leukemia FAB type M1 patient UPN 427, mRNA Partial, 60 nt].

t(11; 19)(q23; p13)

[0124] This translocation is generally addressed in FIG. 1. illustrative embodiments include but are not limited to events comprising the sequences:

[0125] NCBI # S81007 (SEQ ID NO 76) relates to an MLL/ENL=fusion gene {rearranged derivative 11 junction region} [human, leukemic lymphoblasts, T-cell acute lymphoblastic leukemia patient RUPN2, Genomic Mutant, 74 nt]. The authors indicated that the first 34 nt derived from MLL intron 8 on 11q23, and nt 35-74 from the ENL-distal region on 19p13.3

[0126] NCBI # S81008 (SEQ ID NO 77) relates to an ENL {rearranged derivative 19 junction region} [human, leukemic lymphoblasts, T-cell acute lymphoblastic leukemia patient RUPN2, Genomic Mutant, 84 nt]. The authors indicated that nt 55-84 derived from MLL gene 3′ region on 11q23.

t(X; 11)(q13; q23)

[0127] This translocation is generally addressed in FIG. 1. Illustrative embodiments include but are not limited to events comprising the sequences:

[0128] NCBI # NM_{—}005938 (SEQ ID NOs 78 and 79) relate to a human myeloid/lymphoid or mixed-lineage leukemia (trithorax homolog, Drosophila); translocated to, 7 (MLLT7), mRNA. Nucleotides 183-1688 denote an MLLT7 coding region, with nucleotides 465-719 and 480-749 corresponding to a forkhead and forkhead domain, and G and C allelic variations possible at nucleotide 1435.

[0129] NCBI # X93996 (SEQ ID NOs 80 and 81) relate to a human mRNA for AFX protein. Nucleotides 183-1688 are said to be AFX coding sequence.

t(1; 11)(p32; q23)

[0130] This translocation is generally addressed in FIG. 1. Illustrative embodiments include but are not limited to events comprising the sequences:

[0131] NCBI # AF331760 (SEQ ID NO 82) relates to human clone UPN5379L mRNA sequence (bone marrow acute lymphoblastic FAB L2 type).

t(6; 11)(q27; q23)

[0132] This translocation is generally addressed in FIG. 1. Illustrative embodiments include but are not limited to events comprising the sequences:

[0133] NCBI # S82519 (SEQ ID NOs 83 and 84) relate to a human MLL-AF6 fusion protein mRNA, partial cds, identified in a leukemic patient, and with the breakpoint stated to be approximately between nt 26 and 27.

[0134] NCBI # S82521 (SEQ ID NOs 85 and 86) relate to a an MLL-AF6=fusion gene {breakpoint region, clone b} [human, blood, leukemic patient 2, mRNA Partial, 69 nt]. The breakpoint here is said to reside between nt 24 and 25.

[0135] NCBI # S82517 (SEQ ID NOs 87 and 88) relate to an MLL-AF6=fusion gene {breakpoint region} [human, blood, leukemia patient 1, mRNA Partial, 69 nt]. The breakpoint here is said to reside between nt 24 and 25.

t(11; 17)(q23; q21)

[0136] This translocation is generally addressed in FIG. 1. Illustrative embodiments include but are not limited to events comprising the sequences:

[0137] NCBI # S72604 (SEQ ID NOs 89 and 90) relate to an AF17 . . . ALL-1 {reciprocal translocation} [human, acute myeloid leukemia patient, mRNA Partial Mutant, 3 genes, 228 nt]. Nucleotides 1-88 are said to derive from AF17 and nucleotides 89-228 from ALL-1.

[0138] NCBI # (SEQ ID NOs 91 and 92) relate to a human myeloid/lymphoid or mixed-lineage leukemia (trithorax homolog, Drosophila); translocated to, 6 (MLLT6), mRNA. Nucleotides approximating 22-168 are said to encode a PHD zinc finger motif and nucleotides 2185-2292 (amino acids 729-764) are said to encode a leucine zipper motif, with A and G allelic variations at nt 592 possible.

t(8; 21)(q22; q22)

[0139] This translocation is generally addressed in FIG. 1. Illustrative embodiments include but are not limited to events comprising the sequences:

[0140] NCBI # (SEQ ID NOs 93 and 94) relate to a human mRNA for AML1-MTG8 fusion protein, complete cds. The coding sequence is said to be nucleotides 1579-3837 and the breakpoint is said to be between nt 2110 and 2111.

[0141] NCBI # S78158 (SEQ ID NOs 95 and 96) relate to a human AMLI-ETO fusion protein (AML1-ETO) mRNA, partial cds. Nucleotides 1-1767 are said to denote the coding sequence.

[0142] NCBI # S78159 (SEQ ID NOs 97 and 98) relate to a human AML1-ETO fusion protein (AML1-ETO) mRNA, partial cds. Nucleotides 1-696 are said to denote the coding sequence and nucleotides 40 and 41 are said to represent the junction point.

[0143] NCBI # D14822 (SEQ ID NOs 99 and 100) relate to a human chimeric partial mRNA derived from AML1 and MTG8 (ETO) gene sequences. Nucleotides 1-101 are said to derive from the AML1 gene on chromosome 21 and nucleotides 102-799 from the MTG8 (ETO) gene on chromosome 8.

[0144] NCBI # S45790 (SEQ ID NO 101) relates to a AML1/ETO=acute myelogenous leukemia {translocation breakpoint} [human, Genomic Mutant, 237 nt].

[0145] NCBI # Z35296 (SEQ ID NO 102) relates to a human AML1/ETO alternative fusion transcript mRNA, 276 bp. Nucleotides 1-117 are said to derive from AML1 and 186-276 are said to derive from ETO.

[0146] NCBI # D14823 (SEQ ID NOs 103 and 104) relate to a human chimeric mRNA derived from AML1 gene and MTG8 (ETO) gene, partial sequence. Nucleotides 1-101 are said to be derived from the AML1 gene on chromosome 21 and nucleotides 102-1446 are said to be derived from the MTG8 (ETO) gene on chromosome 8, with the coding sequence denoted nt 1-757.

t(3; 21)(q26; q22)

[0147] This translocation is generally addressed in FIG. 1. Illustrative embodiments include but are not limited to events comprising the sequences:

[0148] NCBI # S69002 (SEQ ID NOs 105 and 106) relate to a AML1-EVI-1=AML1-EVI-1 fusion protein {rearranged translocation} [human, leukemic cell line SKH1, mRNA Mutant, 5938 nt]. The author indicated the boundary between AML1 and EVI-1 to be between nt 2138 and 2139, with the coding sequence being 1603-5790.

[0149] NCBI # L21756 (SEQ ID NOs 107 and 108) relate to a human acute myeloid leukemia associated protein (AML1/EAP) mRNA, complete cds. Nucleotides 1-786 are said to denote the coding sequence.

[0150] NCBI # S76343 (SEQ ID NO 109) relates to AML1 . . . EAP {translocation breakpoint} [human, chronic myelogenous leukemia in blast crisis patient, Genomic Mutant, 3 genes, 470 nt]. Nucleotides 1-125 are said to derive from AML1 and nucleotides 126-470 are said to derive from EAP.

t(16; 21)(p11; q22)

[0151] This translocation is generally addressed in FIG. 1. Illustrative embodiments include but are not limited to events comprising the sequences:

[0152] NCBI # S71718 (SEQ ID NOs 110 and 111) relate to a TLS/FUS . . . ERG {translocation} [human, myeloid leukemia patient, peripheral blood, bone marrow cells, mRNA Partial Mutant, 3 genes, 55 nt]. Nucleotides 46-55 are said to derive from ERG, with the codon start beginning with nt 3.

[0153] NCBI # S71805 SEQ ID NOs 112 and 113) relate to a TLS/FUS . . . ERG {translocation} [human, myeloid leukemia patient, peripheral blood, bone marrow cells, mRNA Partial Mutant, 3 genes, 99 nt]. Nucleotides 1-89 are said to derive from TLS/FUS and nucleotides 90-99 from ERG, with the codon start beginning with nt 3.

[0154] NCBI # Y10001(SEQ ID NO 114) relates to a DNA fragment containing fusion point of FUS gene and ERG gene, translocation t(16;21)(p11;q22).

t(6; 9)(p23; q34)

[0155] NCBI # X64229 (SEQ ID NOs 115 and 116) relate to a human dek mRNA. The coding sequence is said to be nt 34-1161.

inv(9;9)

[0156] This translocation is generally addressed in FIG. 1. Illustrative embodiments include but are not limited to events comprising the sequences:

[0157] NCBI # X63689 (SEQ ID NO 117) relates to a human translocation breakpoint in the “can” gene sequence. The translocation breakpoint is said to be 174.175.

[0158] NCBI # M93651 (SEQ ID NOs 118 and 119) relate to a human set gene, complete cds. The coding sequence is said to be 4-837.

t(4; 16)(q26; p13)

[0159] This translocation is generally addressed in FIG. 1. Illustrative embodiments include but are not limited to events comprising the sequences:

[0160] NCBI # Z14955 (SEQ ID NOs 120 and 121) relate to a human mRNA encoding the interleukin 2/BCM fusion protein. Nucleotides 1-321 derive from exons 1-3 of IL-2 and nucleotides 322-864 from the BCM gene.

inv(16)(p13q22)

[0161] This inversion is generally addressed in FIG. 1. Illustrative embodiments include but are not limited to events comprising the sequences:

[0162] NCBI # AF251768 (SEQ ID NOs 122 and 123) relate to a human PCBFB/MYH11E chimeric fusion protein (CBFB/MYH11) mRNA, partial cds. Nucleotides 1-41 correspond to exon 5 of CBFB and nucleotides 42-78 to exon 7 of MYH11.

[0163] NCBI # AF249898 (SEQ ID NOs 124 and 125) relate to a human PCBFbeta/MYH11A chimeric fusion protein (CBFbeta/MYH11A) mRNA, partial cds. Nucleotides 1-41 correspond to exon 5 of CBFB and nucleotides 42-102 to exon 12 of MYH11.

[0164] NCBI # AF249897 (SE ID NOs 126 and 127) relate a human PCBFb-MYH11d chimeric fusion protein (CBFB/MYH11D) mRNA, partial cds. Nucleotides 1-41 correspond to exon 5 of CBFB and nucleotides 42-109 to exon 8 of MYH11.

[0165] NCBI # AF390860 (SEQ ID NO 128) relates to a human isolate UPN2 CBFB/MYH11 translocation breakpoint region sequence.

[0166] NCBI # AF390859 (SEQ ID NO 129) relates to a human isolate UPN1 CBFB/MYH11 translocation breakpoint region sequence.

[0167] NCBI # AF202996 (SEQ ID NOs 130 and 131) relate to human core binding factor beta-smooth muscle myosin heavy chain fusion protein (CBFB-MYH11) mRNA, partial cds. Nucleotides 1-46 are said to correspond to 16q22 and nucleotides 47-89 to 16p13. Nucleotide 50 is said to be a “t” in some cases.

t(5; 12)(q33; p13)

[0168] This translocation is generally addressed in FIG. 1. Illustrative embodiments include but are not limited to events comprising the sequences:

[0169] NCBI # NM_{—}001987 (SEQ ID NOs 132 and 133) relate to a human ets variant gene 6 (TEL oncogene) (ETV6), mRNA. Nucleotides 25-1383 are said to correspond to coding sequence, of which nt 136-393 are said to correspond to a sterile alpha motif (SAM) pointed domain, nt 1036-1290 to an erythroblast transformation-specific (Ets)-domain, and wherein allelic variations including “c”s and “t”s at each of nt 798, nt 1541, and nt 1598, and an “a”s and “c”s at each of nt 1822 and 1881.

[0170] NCBI # U11732 (SEQ ID NOs 134 and 135) relate to a human ets-like gene (tel) mRNA, complete cds. The coding sequence is said to be from nt 25-1383, and the translocation breakpoint said to occur after nt 487.

t(2; 5)(2p23; q35)

[0171] This translocation is generally addressed in FIG. 1. Illustrative embodiments include but are not limited to events comprising the sequences:

[0172] NCBI #14: AF032882 (SEQ ID NO 136) relates to a human anaplastic lymphoma kinase receptor (ALK) and nucleophosmin (NPM) truncated genes at a t(2;5) translocation breakpoint. Nucleotides 1-46 are said to be ALK sequence that is truncated at 3′ due to translocation, and nucleotides 1370-1451 are said to be NPM sequence that is truncated at 5′ due to translocation.

[0173] NCBI # S82740 (SEQ ID NO 137) relates to a NPM/ALK=fusion gene {translocation breakpoint} [human, lymphoma cells SUP-M2, Genomic, 1565 nt].

[0174] NCBI # S82725 (SEQ ID NO 138) relates to a NPM/ALK=fusion gene {translocation breakpoint} [human, lymphoma cells SU-DHL-1, Genomic, 1679 nt].

[0175] NCBI # U04946 SEQ ID NOs 139 and 140) relate to a human nucleophosmin-anaplastic lymphoma kinase fusion protein (NPM/ALK) mRNA, complete cds. The recombination junction is said to occur at nt 353.

t(11; 22) (q24; q12)

[0176] This translocation is generally addressed in FIG. 1. Illustrative embodiments include but are not limited to events comprising the sequences:

[0177] NCBI # AJ229320 (SEQ ID NO 141) relates to a human translocation t(11;22) DNA in ewings's tumor derivative 22 (isolate: EWTUM64/MIC). Nucleotides 1-88 are said to denote EWS sequence and nucleotides 89-180 FLI-1 sequence.

[0178] NCBI # AJ229311 SEQ ID NO 142) relates to a human translocation t(11;22) DNA in ewings's tumor derivative 22 (isolate: EWTUM56/EW20). Nucleotides 1-114 are said to denote EWS sequence and nucleotides 115-180 FLI-1 sequence.

[0179] NCBI # AF177752 (SEQ NO 143) relates to a human clone Jugo Ewing's sarcoma-specific EWS-FLI1 chimera target sequence.

[0180] NCBI # AF177751 (SEQ ID NO 144) relates to a human Juyon Ewing's sarcoma-specific EWS-FLI1 chimera target sequence.

[0181] NCBI # AF177750 (SEQ ID NO 145) relates to a human clone Iti Ewing's sarcoma-specific EWS-FLI1 chimera target sequence.

[0182] NCBI # AF327066 SEQ ID NOs 146 and 147) relate to a human Ewings sarcoma EWS-Fli1 (type 1) oncogene mRNA, complete cds.

[0183] NCBI # XM_{—}060745 (SEQ ID NOs 148 and 149) relate to a human similar to EWS/FLI1 activated transcript 2 (H. sapiens) (LOC127935), mRNA. Nucleotides 10-225 and 13-195 are said to denote src homology 2 (SH2) domains.

[0184] NCBI # AF403479 SEQ ID NOs 150 and 151) relate to a human EWS/FLI1 activated transcript 2 protein mRNA, complete cds.

[0185] NCBI # AF020264 (SEQ ID NOs 152 and 153) relate to a human EWS/FLI1 activated transcript 2 homolog (EAT-2) gene, partial cds.

[0186] NCBI # AF020263 (SEQ ID NOs 154 and 155) relate to a Mus musculus EWS/FLI1 activated transcript 2 (EAT-2) mRNA, complete cds.

[0187] NCBI # S72620 SEQ ID NOs 156 and 157) relate to a EWS . . . . Fli1 [human, T93-113 tumor, mRNA Partial Mutant, 3 genes, 229 nt]. Nucleotides 1-85 are said to denote partial EWS gene sequence and nt 86-229 are said to denote partial FLI-1 sequence.

[0188] NCBI # S64709 (SEQ ID NO 158) relates to EWS . . . Fli-1 {translocation} [human, IARC-EW11 Ewing's tumor-derived cells, mRNA Mutant, 3 genes, 100 nt]. Nucleotides 1-18 are said to denote partial EWS gene sequence and nt 19-100 are said to denote partial FLI-1 sequence.

[0189] NCBI # S62665 (SEQ ID NOs 159 and 160) relate to a type 4 EWS-FLI1 fusion {translocation} [human, primitive neuroectodermal tumor cell line TC-32, mRNA Partial Mutant, 60 nt]. Positions 1-31 are said to be from the 5′ portion of EWS on chromosome 22 and positions 32-60 are said to be from the 3′ (DNA-binding) region of FLI1 on chromosome 11.

inv(10)(q11.2; q21)

[0190] This aberration is generally addressed in FIG. 1. Illustrative embodiments include but are not limited to events comprising the sequences:

[0191] NCBI # AF395885 (SEQ ID NO 161) relates to a human H4/RET fusion mRNA, partial sequence. tyrosine kinase domain of the ret. Nt 1-83 are said to derive from H4, nt 84-142 from an unidentified insertion sequence, and nt 143-447 from ret. The tyrosine kinase domain in the ret portion is said be constitutively active in the fusion product.

[0192] NCBI # NM_{—}005436 (SEQ ID NOs 162 and 163) relate to a human DNA segment, single copy, probe pH4 (transforming sequence, thyroid-1, (D10S170), mRNA. Nt 37-1794 are said to represent coding sequence, nt 202-996 said to encode a mysosin tail, nt 610-999 an Ezrin/radixin/moesin family (ERM) region, with “a” and “c” allelic variation possible at nts 979, 1080, and 1445, and “a” and “g” possible at nt 1362, and “t” and “c” possible at nts 1996 and 2642.

[0193] NCBI #S77910 (SEQ ID NO 164) relates to H4=gene frequently rearranged with the ret proto-oncogene {promoter} [human, Genomic, 447 nt]. Nt 442-447 are said to correspond to the coding sequence, “MA”.

[0194] NCBI # S72869 (SEQ ID NOs 165 and 166) relate to H4(D10S170)=putative cytoskeletal protein [human, thyroid, mRNA, 3011 nt]. Nt 37-1794 are said to correspond to coding sequence.

[0195] NCBI # X65617 (SEQ ID NO 167) relates to a human ret proto-oncogene DNA. Nt 1-54 are said to replace sequences from the H4 gene, nt 55-787 are said to correspond to an intron between the transmembrane and tyrosine kinase domain, and nt 788-808 said to correspond to an exon coding for a tyrosine kinase domain.

t(12;22)(q13;q12)

[0196] This translocation is generally addressed in FIG. 1. Illustrative embodiments include but are not limited to events comprising the sequences:

[0197] NCBI # NM_{—}005171 (SEQ ID NOs 168 and 169) relate to a human activating transcription factor 1 (ATF1), mRNA. Nt 157-252 are said to correspond to a pKID domain and nt 631-795 are said to correspond to a bZIP transcription factor region.

[0198] NCBI # AF047022 (SEQ ID NOs 170 and 171) relate to a human RNA binding protein-activating transcription factor-1 fusion protein (EWS-ATF1) mRNA, partial cds. Nt 1-65 are said to correspond to chromosome 22 and nt 66-353 to chromosome 12, with nt 66ˆ67 said to represent the fusion junction between the EWS and ATF1 genes.

t(12; 16(q13; p11)

[0199] This translocation is generally addressed in FIG. 1. Illustrative embodiments include but are not limited to events comprising the sequences:

[0200] NCBI # AJ301614 (SEQ ID NO 172) relates to a human t(12;16)(q13;p11) translocation breakpoint (CHOP/FUS chimaeric genomic DNA). Nt 1-225 are said to correspond to the CHOP gene (chromosome 12) and nt 226-500 to the FUS gene (chromosome 16).

[0201] NCBI # AJ301613 (SEQ ID NO 173) relates to a human t(12;16)(q13;p11) translocation breakpoint (FUS/CHOP chimaeric genomic DNA). Nt 1-317 are said to correspond to the FUS gene (chromosome 16) and nt 318-521 to the CHOPgene (chromosome 12).

[0202] NCBI # AJ301612 (SEQ ID NOs 174 and 175) relate human partial mRNA for FUS/CHOP chimaeric fusion protein (type 9 transcript variant). Nt 1-118 are said to originate from chromosome 16 and nt 119-225 are said to originate from chromosome 12.

[0203] NCBI # AJ301611 (SEQ ID NOs 176 and 177) relate to a human partial mRNA for FUS/CHOP chimaeric fusion protein (type 8 transcript variant). Nt 1-128 are said to originate from chromosome 16 and nt 129-235 are said to originate from chromosome 12.

[0204] NCBI # NM_{—}004960 (SEQ ID NOs 178 and 179) relate to a human fusion protein derived from t(12;16) malignant liposarcoma (FUS), mRNA. Nt 79-1659 are said to denote the coding sequence. Allelic variation is stated to be possible at nts 225 (a/c), 369 (c/t), and 1586 (a/g). Nt 937-1173 are said to denote an RNA recognition motif (RRM), and nt 1354-1425 are said to denote a zinc finger domain in a Ran binding proteins (zf-Ranbp).

[0205] NCBI # S75762 (SEQ ID NOs 180 and 181) relate to a FUS . . . CHOP [human, myxoid liposarcoma specimens, mRNA Partial Mutant, 3 genes, 652 nt]. Nucleotides 1-272 are said to derive from FUS.

[0206] NCBI #X71427 (SEQ ID NOs 182 and 183) relate to a human mRNA for FUS-CHOP protein fusion. Nucleotides 70-1458 are said to denote the fusion coding sequence.

[0207] NCBI # X71428 (SEQ ID NOs 184 and 185) relate to a human mRNA for FUS gycline rich protein. Nucleotides 73-1650 are said to denote the coding sequence.

[0208] NCBI # Y10004 (SEQ ID NO 186) relates to a human DNA fragment containing fusion point of FUS gene and CHOP gene, translocation t(12;16)(q13;p11. The sequence is said to contain 5′-FUS intron 7 sequence and intron 1 3′ sequence from CHOP.

[0209] NCBI # Y10003 (SEQ ID NO 187) relates to a human DNA fragment containing fusion point of FUS gene and CHOP gene, translocation t(12;16)(q13;p11. The sequence is said to contain 5′-FUS intron 7 sequence and intron 1 3′ sequence from CHOP.

[0210] NCBI # Y10002 (SEQ ID NO 188) relates to a human DNA fragment containing fusion point of FUS gene and CHOP gene, translocation t(12;16)(q13;p11). The sequence is said to contain 5′-FUS intron 7 sequence and intron 1 3′ sequence from CHOP.

[0211] NCBI # S75763 (SEQ ID NOs 189 and 190) relate to a FUS . . . CHOP [human, myxoid liposarcoma specimens, mRNA Partial Mutant, 3 genes, 377 nt]. Nt 1-272 are said to derive from FUS and nt 273-377 from CHOP.

t(2; 13)(q35;q14)

[0212] This translocation is generally addressed in FIG. 1. Illustrative embodiments include but are not limited to events comprising the sequences:

[0213] NCBI # U02308 (SEQ ID NOs 191 and 192) relate a human PAX-3-FKHR gene fusion mRNA, partial cds. Nt 1-2070 are said to be coding sequence.

t(x; 18)(p11.2; q11.2)

[0214] This translocation is generally addressed in FIG. 1. Illustrative embodiments include but are not limited to events comprising the sequences:

[0215] NCBI # S79894 (SEQ ID NOs 193 and 194) relate to a SYT . . . SSX {translocation breakpoint} [human, synovial sarcoma patient, tumor, mRNA Mutant, 3 genes, 165 nt]. Nt 1-18 are said to derive from SYT and nt 22-165 from SSX.

[0216] NCBI # X86175 (SEQ ID NOs 195 and 196) relate to a human mRNA for SSX2 protein. Nt 92-658 are said to be coding sequence.

[0217] The following chromosomal aberrations are not discussed in FIG. 1 and will now be discussed in more detail:

t(12:21)(13:q32)

[0218] The TEL (ETV6)-AML1 (CBFA2) gene fusion is the most common reciprocal chromosomal rearrangement in childhood cancer, occurring in approximately 25% of the most predominant subtype of leukemia-common acute lymphoblastic leukemia. Ford et al., Proc. Natl. Acad. Sci. U.S.A. 95 (8), 4584-4588 (1998), reported characterization of the translocation event responsible for one TEL-AML1 genomic sequence in a pair of monozygotic twins diagnosed at ages 3 years, 6 months and 4 years, 10 months with common acute lymphoblastic leukemia. The twins shared an identical rearranged IgH allele. These data have implications for the etiology and natural history of childhood leukemia.

[0219] Other articles of interest on this subject include: Wiemels et al., Protracted and variable latency of acute lymphoblastic leukemia after TEL-AML1 gene fusion in utero, Blood. 1999 Aug. 1; 94(3):1057-62; Rubnitz et al., The role of TEL fusion genes in pediatric leukemias, Leukemia, 1999 January; 13(1):6-13. Review; Romana et al., The t(12;21) of a cute lymphoblastic leukemia results in a tel-AML1 gene fusion, Blood. 1995 Jun. 15; 85(12):3662-70; Seeger et al., TEL-AML1 fusion in relapsed childhood acute lymphoblastic leukemia, Blood. 1999 94(1):374-6; Bayar et al., Monozygotic twins with congenital acute lymphoblastic leukemia (ALL) and t(4;11)(q21;q23), Cancer Genet Cytogenet. 1996 Jul. 15; 89(2):177-80; Kobayashi et al., Detection of the Der (21)t(12;21) chromosome forming the TEL-AML1 fusion gene in childhood acute lymphoblastic leukemia, Leuk Lymphoma. 1997 December; 28(1-2):43-50; and Shurtleff et al., TEL/AML1 fusion resulting from a cryptic t(12;21) is the most common genetic lesion in pediatric ALL and defines a subgroup of patients with an excellent prognosis, Leukemia, 1995 (12):1985-9.

[0220] NCBI# AF044317 (SEQ ID NO 197) relates to a human TEL/AML1 fusion gene, partial sequence. This was derived from an ALL infant. Nts 1-407 are said to derive from TEL and nts 408-548 from AML1.

[0221] NCBI # AF231770 (SEQ ID NO 198) relates to a human ETV6/AML1 translocation breakpoint region.

t(9:12)(q34; p13)

[0222] In human leukemia, activation of the ABL proto-oncogene locus on chromosome 9 most commonly occurs as a result of its fusion to the BCR locus on chromosome. Papadopoulos et al., Cancer Res. 55 (1), 34-38 (1995), reported a t(9;12) event—a chimeric ABL protein displaying an elevated tyrosine kinase activity fused to a TEL protein from chromosome 12. Like BCR, TEL is fused in-frame with ABL and produces a fusion protein with an elevated tyrosine kinase activity when assayed in an immune complex. The amino-terminal sequences of TEL encodes a helix-loop-helix motif which may mediate dimerization. 43: See also Okuda et al., Oncogene. 1996 Sep. 19; 13(6):1147-52.

[0223] NCBI # Z36279 (SEQ ID NO 199) relates to a human (9TX) breakpoint position DNA for the tel-abl fusion identified by Papadopoulos et al. The translocation breakpoint is said to reside betweeen nt 567 and 568.

del(12p)

[0224] Revy et al., Cell 102:565-575 (2000), reported hyper IgM immunodeficiencies associated with deletions of 19 and 9 bases at cDNA positions 21 and 175 respectively of the activation-induced cytidine deaminase (AID) gene. The former results in a 6 amino acid deletions and a phe15 to ter premature nonsense codon. The latter results in a 3-amino acid deletion and leu59-to-phe substitution.

[0225] NCBI # AB040430 (SEQ ID NOs 200 and 201) relate to a human AID gene for activation-induced cytidine deaminase, complete cds.

[0226] NCBI # AB040431 (SEQ ID NO 202 and 203) relate to a human AID mRNA for activation-induced cytidine deaminase, complete cds. Nt 77-673 is said to be coding sequence.

[0227] NCBI # NM_{—}020661 (SEQ ID NOs 204 and 205) relate to a human activation-induced cytidine deaminase (AICDA), mRNA. Nt 77-673 is said to be coding sequence. Allelic variation (a/g) is said to occur at nt 541.

t(15;17)(q22;q12)

[0228] de The et al., Cell 1991 Aug. 23; 66(4):675-84, reported a PML-RAR alpha fusion mRNA generated by a t(15;17) translocation associated with acute promyelocytic leukemia (APL). The gene product contained a novel zinc finger motif common to several DNA-binding proteins and the mRNA encoded a predicted 106 kd chimeric protein containing most of the PML sequences fused to a large part of RAR alpha, including its DNA- and hormone-binding domains. In transient expression assays, the hybrid protein exhibited altered transactivating properties if compared with the wild-type RAR alpha progenitor. Identical PML-RAR alpha fusion points were found in several patients, suggesting that in APL the t(15;17) translocation generates an RAR mutant that could contribute to leukemogenesis through interference with promyelocytic differentiation.

[0229] NCBI # S50916 (SEQ ID NOs 206 and 207) relate to a PML-RAR fusion gene {fusion transcript} [human, mRNA Partial, 1284 nt]. Nt 1-1251 is said to be coding sequence.

[0230] NCBI # M73779 (SEQ ID NOs 208 and 209) relate to a human PML-RAR protein (PML-RAR) mRNA, complete cds. Nt 67-2460 is said to be coding sequence.

[0231] NCBI # AJ417079 (SEQ ID NOs 210 and 211) relate to a human partial mRNA for PML/RARA fusion protein (PML/RARA gene). Nt 1-109 are said to derive from exon 6 of PML and nts 110-172 and 173-296 are said to derive from intron 2 and exon 3 of RARA.

t(11;17)(q23;q12)

[0232] Chen et al., EMBO J., 12 (3), 1161-1167 (1993), reported a fusion between a novel Kruppel-like zinc finger gene and the retinoic acid receptor-alpha locus due to a variant t(11;17) translocation associated with acute promyelocytic leukaemia (APL). Chen et al identified mRNAs containing the coding sequences of the new gene, fused in-frame either upstream of the RAR alpha B region or downstream from the unique A1 and A2 regions of the two major RAR alpha isoforms. The new gene, which Chen et al. termed PLZF (for promyelocytic leukaemia zinc finger), encodes a potential transcription factor containing nine zinc finger motifs related to the Drosophila gap gene Kruppel and is expressed as at least two isoforms which differ in the sequences encoding the N-terminal region of the protein. Within the haematopoietic system the PLZF mRNAs are detected in the bone marrow, early myeloid cell lines and peripheral blood mononuclear cells, but not in lymphoid cell lines or tissues. In addition, the PLZF mRNA levels were down-regulated in NB-4 and HL-60 promyelocytic cell lines in response to retinoic acid-induced granulocytic differentiation and were very low in mature granulocytes, suggesting an important role for PLZF as well as retinoic acid and its receptors in myeloid maturation.

[0233] NCBI # NM_{—}006006 (SEQ ID NOs 212 and 213) relate to a human zinc finger protein 145 (Kruppel-like, expressed in promyelocytic leukemia) (ZNF145), mRNA. Nt 76-2097 are said to be coding sequence.

[0234] NCBI # Z19002 (SEQ ID NOs 214 and 215) relate to a human PLZF gene encoding kruppel-like zinc finger protein. Nt 76-2097 are said to be coding sequence.

t(16:16)(p13;q22) and inv(16)

[0235] Springall et al., Leukemia 12 (12), 2034-2035 (1998), identified a novel CBFB-MYH11 fusion transcript in a patient with AML and attributed it to an inversion/translocation of chromosome 16. See also, Krauter et al., Genes Chromosomes Cancer. 2001 April; 30(4):342-8, Detection and quantification of CBFB/MYH11 fusion transcripts in patients with inv(16)-positive acute myeloblastic leukemia by real-time RT-PCR; Martinelli et al., Haematologica. 2000 May; 85(5):552-5, Long-term disease-free acute myeloblastic leukemia with inv(16) is associated with PCR undetectable CBFbeta/MYH11 transcript; and Dierlamm et al., Genes Chromosomes Cancer. 1998 June; 22(2):87-94. Review, FISH identifies inv(16)(p13q22) masked by translocations in three cases of acute myeloid leukemia.

[0236] NCBI # AF202996 (SEQ ID NOs 216 and 217) relate to a human core binding factor beta-smooth muscle myosin heavy chain fusion protein (CBFB-MYH11) mRNA, partial cds. Nt 1-46 are said to originate from 16q22 and nt 47-89 are are said to originate from 16p13. Nt 50 is said to be a “t” in some reports.

[0237] NCBI # AF251768 (SEQ ID NOs 218 and 219) relate to human PCBFB/MYH11E chimeric fusion protein (CBFB/MYH11) mRNA, partial cds. Nt 1-42 are said to derive from exon 5 of CBFB and nts 42-78 from exon 7 of MYH11.

[0238] NCBI # AF249898 (SEQ ID NOs 220 and 221) relate to a human PCBFbeta/MYH11A chimeric fusion protein (CBFbeta/MYH11A) mRNA, partial cds. Nt 1-42 are said to derive from exon 5 of CBFB and nts 42-78 from exon 12 of MYH11.

[0239] NCBI # AF249897 (SEQ ID NOs 222 and 223) relate to a human s PCBFb-MYH11d chimeric fusion protein (CBFB/MYH11D) mRNA, partial cds.

[0240] NCBI # AF390860 (SEQ ID NO 224) relates to a human UPN2 CBFB/MYH11 translocation breakpoint region sequence.

[0241] NCBI # AF390859 (SEQ ID NO 225) relates to a human isolate UPN1 CBFB/MYH11 translocation breakpoint region sequence.

t(9;11)(p22;q23)

[0242] Tkachuk et al., Cell 71: 691-700, (1992), showed that the gene involved in recurring 11q23 leukemogenic translocations codes for an unusually large protein that is a homolog of Drosophila ‘trithorax’ and is involved in homeotic gene regulation (MLL; aka ALL1). In studies of a t(11;19) translocation, they identified a chimeric protein containing the amino-terminal ‘AT-hook’ motifs of the MLL gene on chromosome 11 fused to a previously undescribed protein from chromosome 19. The nucleotide sequence determinations demonstrated an open reading frame that coded for a predicted 62-kD protein, which Tkachuk et al. named ENL.

[0243] Nakamura et al., Proc. Nat. Acad. Sci. 90: 4631-4635, (1993), showed that the gene on chromosome 19 that is fused to the MLL gene in patients with leukemia and translocation t(11;19)(q23;p13) shows high sequence homology to the genes on chromosome 4 and chromosome 9 that are fused with the ALL1 gene in patients with translocation t(4;11)(q21;q23) and t(9;11)(p22;q23), respectively. The 3 protein gene products contained nuclear targeting sequences as well as serine-rich and proline-rich regions. The results suggested that the different proteins fused to ALL1 polypeptides. These leukemias provide similar functional domains.

[0244] Negrini et al., Cancer Res 1993 Oct. 1; 53(19):4489-92, reported potential topoisomerase II DNA-binding sites at the breakpoints of a t(9;11) chromosome translocation in acute myeloid leukemia. The event examined was a t(9;11)(p22;q23) chromosome translocation and the breakpoints on the two chromosomes occurred within introns of the involved genes: AF-9 on chromosome 9, and ALL-1 on chromosome 11. Sequence analysis identified heptamers flanking the breakpoints on both chromosomes 9 and 11, suggesting that the V-D-J recombinase was involved in the translocation. See also Cimino et al., Cancer Res. 1991 Dec. 15; 51(24):6712-4, Cloning of ALL-1, the locus involved in leukemias with the t(4;11)(q21;q23), t(9;11)(p22;q23), and t(11;19)(q23,p13) chromosome translocations.

[0245] Poirel et al., Blood 87 (6), 2496-2505 (1996), reported an MLL-AF9=fusion gene {fusion site} [human, peripheral blood, acute myeloid leukemia FAB type M1 patient UPN 427, mRNA Partial, 60 nt]; NCBI # S82034 (SEQ ID NO 226), and indicated the breakpoint to be at nucleotide 29.

t(1;22)(p13;q13)

[0246] Nakamura et al., Proc Natl Acad Sci USA 1993 May 15; 90(10):4631-5, correlated aberrations on chromosomes 4, 9, and 19 involved in 11q23 abnormalities in acute leukemia with shared sequence homology and/or common motifs, including fusions of the ENL gene with ALL-1 in (11:19) translocations. ENL proteins contain nuclear targeting sequences as well as serine-rich and proline-rich regions. Stretches abundant in basic amino acids are also present.

[0247] NCBI # AF364037 (SEQ D NOs 227 and 228) relate to a human megakaryoblastic leukemia-1 protein/RNA-binding motif protein 15s+ae fusion protein (MKL1/RBM15 fusion) mRNA, complete cds. Ma et al., Nat. Genet. 28 (3), 220-221 (2001) identified this with an acute megakaryoblastic leukemia patient. Nt 144-221 are said to be coding sequence, with nts 1-150 deriving from chromosome 22 and nts 151-300 deriving from chromosome 1.

t(3;3)(q21;q26) or inv(3)(q21q26)

[0248] Ogawa et al., Oncogene 1996 Jul. 4; 13(1):183-91 showed that overexpression of the Evi-1 gene appears to be a consistent feature of the 3q21q26 syndrome, an association of myeloid leukemias/myelodysplastic syndrome with a specific chromosomal aberration involving both 3q21 and 3q26, such as t(3;3)(q21;q26) or inv(3)(q21q26). The rearrangement in 3q26 has been reported to occur near the Evi-1 locus, implicating that it is the critical gene deregulated in the 3q21 q26 syndrome. Ogawa identified a structural abnormality of Evi-1 protein in a case with the 3q21q26 syndrome. That case carried the typical inv(3)(q21 q26), in which the 3q26 breakpoint is located within an intron of the Evi-1 gene, and resulted in overexpression of a normally unexpressed, aberrant form of Evi-1 protein, in which the C-terminal 44 amino acids of wild-type Evi-1 protein were truncated and replaced by five amino acids. The truncated Evi-1 protein was shown to increase API activity when expressed in NIH3T3 cells as its wild-type counterpart. The origin of this peculiar type of rearrangement of the Evi-1 gene was shown not to be an artifact during establishment of the cell line, but rather an event that occurred in the primary leukemic cells, and consistent with 3q21q26 syndrome.

[0249] NCBI # S82592 (SEQ ID NOs 229 and 230) relate to an Evi-1=Evi-1 protein {3′ region, deletion region} [human, megakaryoblastoid cell line MOLM-1, chronic myelocytic leukemia patient, mRNA Partial Mutant, 916 nt]. Nt 1-132 are said to represent a partial coding sequence.

t(3;5)(q25;q34)

[0250] Yoneda-Kato et al., Oncogene 12: 265-275 (1996), showed that t(3;5)(q25.1;q34) of myelodysplastic syndrome and acute myeloid leukemia produces a novel fusion gene, NPM-MLF1, which results from an in-frame fusion between the 5-prime coding region of the nucleophosmin gene on chromosome 5 and a gene on chromosome 3, designated MLF1 (myeloid leukemia factor-1). The translocation was identified in 3 t(3;5)-positive cases of AML. Expression of the mRNA was widespread but highest in testis, ovary, skeletal muscle, heart, kidney and colon. Antibodies to MLF1 detected a 31-kD protein in K562 and HEL erythroleukemia cell lines

[0251] NCBI # L49054 (SEQ ID NOs 231 and 232) relate to a t(3;5)(q25.1;p34) fusion gene NPM-MLF1 mRNA, complete cds. Nt 109-915 are said to be coding sequence.

[0252] NCBI # BC007045 (SEQ ID NOs 233 and 234) relate to a human myeloid leukemia factor 1, clone MGC:12449, mRNA, complete cds. Nt 107-913 are said to be coding sequence.

[0253] NCBI # L49054 (SEQ ID NOs 235 and 236) relate to a human t(3;5)(q25.1;p34) fusion gene NPM-MLF1 mRNA, complete cds. Nt 109-915 are said to be coding sequence.

t(7;11)(p15;p15)

[0254] Borrow et al., Nat. Genet. 1996 February; 12(2):159-67, reported a t(7;11)(p15;p15) translocation in acute myeloid leukaemia that fused the genes for nucleoporin NUP98 and class I homeoprotein HOXA9.

[0255] NCBI # U41814 (SEQ ID NOs 237 and 238) relate to human NUP98-HOXA9 fusion protein mRNA, partial cds. Nt 46ˆ47 are said to represent a NUP98-HOXA9 in-frame junction and nt 138ˆ139 are said to be an alternative splice site within HOXA9

[0256] NCBI # NM_{—}002142 (SEQ ID NOs 239 and 240) relate to a human homeo box A9 (HOXA9), mRNA. Nts 67 and 213 are said to have allelic variation possible (c/g), and nt 397-567 and 397-576 are said to respectively represent a homeobox domain and a homeodomain (HOX region).

[0257] NCBI # U81511 (SEQ ID NOs 241, 242, and 243) relate to a human HOXA-9A and HOXA-9B (HOXA-9) gene, alternatively spliced, complete cds. Nts 145-502, 4327-4894, and 5893-6131 are said to be exon (coding) sequences, with introns present at 503-5892 and 4895-5892. Alternative splicing events are said to account for the overlap.

t(8;16)(p11;p13)

[0258] Panagopoulos et al., Genes Chromosomes Cancer. 2000 August; 28(4):415-24, used RT-PCR analysis to identify MOZ-CBP and CBP-MOZ chimeric transcripts in acute myeloid leukemias with t(8;16)(p11;p13) translocations.

[0259] NCBI # AJ251844 (SEQ ID NOs 244 and 245) relate to human partial mRNA for MOZ/CBP chimeric transcript type II. Nt 1-188 are said to derive from chromosome 8 and nts 189-415 from chromosome 16.

[0260] NCBI # AJ251845 (SEQ ID NOs 246 and 247) relate to a human partial mRNA for CBP/MOZ chimeric transcript. Nt 1-110 are said to derive from chromosome 16 and nts 111-229 from chromosome 8.

[0261] NCBI # AJ251843 (SEQ ID NOs 248 and 249) relate to human partial mRNA for MOZ/CBP chimeric transcript type I. Nt 1-188 are said to derive from chromosome 8 and nts 189-1128 from chromosome 16.

[0262] NCBI # U47742 (SEQ ID NOs 250 and 251) relate to human monocytic leukaemia zinc finger protein (MOZ) mRNA, complete cds.

[0263] NCBI # U85962 (SEQ ID NOs 252 and 253) relate to a human CREB-binding protein mRNA, complete cds. Nt 814-8147 are said to contain coding sequence and nts 819-1124 are said to encode a nuclear receptor binding domain.

t(9;12)(q34;p13)

[0264] Papadopoulos et al., Cancer Res. 1995 Jan. 1; 55(1):34-8, reported activation of ABL by fusion to an ets-related gene, TEL.

[0265] NCBI # Z35761 (SEQ ID NOs 254 and 255) relate to a human TEL/ABL fusion protien. Nt 1-463 are said to contain a partial TEL sequence and nt 464-549 are said to contain ABL sequence.

[0266] NCBI # Z36279 (SEQ ID NO 256) relates to human (9TX) breakpoint position DNA. The breakpoint position is said to reside at 567 . . . 568.

[0267] NCBI # Z36278 (SEQ ID NO 257) relates to human (boucher) breakpoint position DNA. The breakpoint position is said to reside at 567.568.

t(12;22)(p13;q13)

[0268] Buijs et al., Oncogene. 1995 Apr. 20; 10(8):1511-9, reported that a t(12;22) (p13;q11) event resulted in a myeloproliferative disorders characterized by the fusion of the ETS-like TEL gene on 12p13 to the MN1 gene on 22q11.

[0269] NCBI # X85024 (SEQ ID NOs 258 and 259) relate to a human mRNA for TEL-MN1 fusion gene (type II). Nt 22.23 is said to be the fusion site.

[0270] NCBI # X85026 (SEQ ID NOs 260 and 261) relate to a human mRNA for a TEL-MN1 fusion gene (type I). Nt 22.23 is said to be the fusion site.

[0271] NCBI # X85027 (SEQ ID NOs 262 and 263) relate to a human mRNA for a MN1-TEL fusion gene (type II). Nt 22.23 is said to be the fusion site.

[0272] NCBI # X85025 (SEQ ID NOs 264 and 265) relate to a human mRNA for a MN1-TEL fusion gene (type I). Nt 22.23 is said to be the fusion site.

del(5q)

[0273] Jaju et al., Blood 1999 Jul. 15; 94(2):773-80, reported a recurrent translocation, t(5;11)(q35;p15.5), associated with a del(5q) in childhood acute myeloid leukemia. Partial deletion of the long arm of chromosome 5, del(5q), is the cytogenetic hallmark of the 5q-syndrome, a distinct subtype of myelodysplastic syndrome-refractory anemia (MDS-RA). Deletions of 5q also occur in the full spectrum of other de novo and therapy-related MDS and acute myeloid leukemia (AML) types, most often in association with other chromosome abnormalities. However, the loss of genetic material from 5q is believed to be of primary importance in the pathogenesis of all del(5q) disorders.

[0274] Lindgren et al., Am J Hum Genet 1992 May; 50(5):988-97, reported phenotypic, cytogenetic, and molecular studies of three patients with constitutional deletions of chromosome 5 in the region of the gene for familial adenomatous polyposis, APC, affiliated with colon cancer and polyps. High-resolution banding studies indicated that some deletions spans the region 5q21-q22.

[0275] Other potential deletion aberrations at the 5q locus include but are not limited to deletions at positions 5q13.3, corrsponding to the RASA1 gene encoding the GAP RAS p21 protein activator 1 (GTPase activating protein), aberrancies of which are known to associate with basal cell carcinoma; 5q21, corresponding to the PST gene encoding PST1 Polysialyltransferase; 5q21-q22, corresponding to the APC gene, aberrancies of which correlate with colorectal cancer; 5q31, corresponding to the FACL6 gene encoding ACS2 Fatty-acid-Coenzyme A ligase, a long-chain 6 (long-chain acyl-CoA synthetase 2), aberrancies of which give rise to myelodysplastic syndrome and acute myelogenous leukemia; 5q31, encoding the GRAF GTPase regulator associated with the focal adhesion kinase, aberrancies of which give rise to juvenile myelomonocytic leukemia; 5q31.1, encoding IRF1, a MAR Interferon regulatory factor-1, aberrancies of which give rise to macrocytic anemiam myelodysplastic syndrome (preleukemic), acute myelogenous leukemia, gastric cancer, and nonsmall cell lung cancer; 5q33.2-q33.3, corresponding to CSF1R, FMS Colony-stimulating factor-1 receptor, aberrance is of which have been associated with oncogene FMS (McDonough feline sarcoma), and predisposition to myeloid malignancy; 5q35, encoding NPM1 Nucleophosmin 1 (nucleolar phosphoprotein B23, numatrin), aberrancies of which are known to associate with acute promyelocytic leukemia; 5q35.3, encoding gene FLT4, VEGFR3, encoding PCL fms-related tyrosine kinase-4 (vascular endothelial growth factor receptor, aberrancies of which contribute to hereditary lymphedema.

[0276] NCBI # NM_{—}002387 (SEQ ID NOs 266 and 267) relate to a human gene that is found mutated in colorectal cancers (MCC) mRNA. Nt 221-2710 are said to represent coding sequence. Allelic variation is said to exist at nt 2869 (c/t).

del(7q)

[0277] Schwartz et al., Cytogenet. Cell Genet. 51: 152-153 (1991) reported deletion mapping of plasminogen activator inhibitor, type I (PLANH1) and beta-glucuronidase (GUSB) in 7q21-q22. Wedemeyer et al., Genomics 46: 313-315 (1997) reported the proximity of the human HIP1 gene close to the elastin (ELN) locus on 7q11.23. Dridi et al., Am. J. Med. Genet. 87: 134-138 (1999), reported skin elastic fibers in Williams syndrome and Dutly et al., Am. J. Med. Genet. 87: 134-138 (1999), reported unequal interchromosomal rearrangements corresponding to deletions in these genes, and affiliated with Williams-Beuren syndrome. Naritomi et al., Hum. Genet. 80: 201-202 (1988), reported a microdeletion of the proximal long arm of chromosome 7 affiliated with Zellweger syndrome. Horiike et al., Leukemia. (1999) August; 13(8):1235-42, reported distinct genetic involvement of the TP53 gene in therapy-related leukemia and myelodysplasia, with chromosomal 7 losses and their possible relationship to replication error phenotype and the development of therapy-related AML/MDS. Wong et al., Cancer Genet Cytogenet. 1995 Jul. 1; 82(1):70-2, reported biclonal acute monoblastic leukemia associated with del(7q). Particular sites of interest include 7q11.23, encoding PTPN12, PTPG1 Protein tyrosine phosphatase, nonreceptor-type, known to associate with colon cancer; 7q21-q22, encoding PEX1, ZWS1 Peroxisome biogenesis factor-1, associate with Zellweger syndrome-1, neonatal adrenoleukodystrophy and infantile Refsum disease; 7q22-q31.1, encoding SLC26A3, DRA, CLD Solute carrier family 26 (sulfate transporter), member 3, associated with colon cancer; 7q31-q32 SMOH, SMO Smoothened, Drosophila, homolog of 601500, associated with sporadic basal cell carcinoma.

del(20q)

[0278] A deletion in the long arm of chromosome 20 is a recurring abnormality in malignant myeloid disorders. Its occurrence suggests that the loss of genetic material on 20q provides a proliferative advantage to myeloid cells, possibly through the loss of a tumor-suppressor gene. Roulston et al., Blood 82: 3424-3429 (1993), examined a series of patients with the del(20q) using fluorescence in situ hybridization with unique sequence probes that map along the length of 20q and delineated a segment that is deleted in 95% of all patients they examined (18 of 19). In addition, they showed that the deletions are interstitial rather than terminal. The region of deletion extended from 20q11.2 to 20q12 and was flanked by RPN2 (180490) proximally and D20S17 distally. The SRC (190090) and ADA (102700) genes were found to be located within the commonly deleted segment.

[0279] Stoffel et al. (1996) generated a YAC contig map of 20q11.2-q13.1 in a region spanning about 18 Mb and representing about 40% of the physical length of 20q. The map contains the chromosomal regions deleted in MODY1 (125850) and in myeloid leukemia Using this physical map, they refined the location of a myeloid tumor suppressor-related gene to an 18-cM interval (approximately 13 Mb) between RPN2 and D20S17.

[0280] Stoffel et al., Proc. Nat. Acad. Sci. 93: 3937-3941 (1996), correlated the occurrence of del(20q) in a broad spectrum of myeloid disorders, suggesting that the loss of genetic material on 20q could provide a proliferative advantage to myeloid cells, possibly through the loss of a tumor-suppressor gene. Stoffel et al. examined a series of patients with the del(20q) using fluorescence in situ hybridization (FISH) with unique sequence probes that map along the length of 20q, delineated a segment that is deleted in 95% of all patients examined (18 of 19), and showed that the deletions are interstitial rather than terminal. This region of deletion extends from 20q11.2 to q12, and is flanked by the RPN2 (proximal) and D20S17 loci (distal). The SRC and ADA genes are located within the commonly deleted segment.

t(11q23)

[0281] Shiah et al., Leukemia, (2002) 16(2):196-202, reported clinical and biological implications of partial tandem duplication of the MLL gene in acute myeloid leukemia without chromosomal abnormalities at 11q23. The clinical and biological features of acute mycloid leukemia (AML) with 11q23/MLL translocations are well known, but the characteristics of AML with partial tandem duplication of the MLL gene have not been explored comprehensively. Sheah et al analyzed MLL duplication in 81 AML patients without chromosomal abnormalities at 11q23, using Southern blotting, genomic DNA polymerase chain reaction (PCR), reverse-transcription PCR and complementary DNA sequencing. Nine patients showed partial tandem duplication of the MLL gene, including eight (12%) of the 68 with normal karyotype. Seven patients showed fusion of exon 6/exon 2 (e6/e2), one, combination of differentially spliced transcripts e7/e2 and e6/e2, and the remaining one, combination of e8/e2 and e7/e2. Among the patients with normal karyotype, children aged 1 to 15 showed a trend to higher frequency of MLL duplication than other patients (2/5 or 40% vs 6/62 or 10%, P=0.102). The patients with tandem duplication of the MLL gene had a significantly higher incidence of CD11b expression on leukemic cells than did those without in the subgroup of patients with normal karyotype (75% vs 28%, P=0.017). There were no significant differences in the expression of lymphoid antigens or other myeloid antigens between the two groups of patients. In adults, the patients with MLL duplication had a shorter median survival time than those without (4.5 months vs 12 months, P=0.036). In conclusion, partial tandem duplication of the MLL gene is associated with increased expression of CD11b on leukemic blasts and implicates poor prognosis in adult AML patients. The higher frequency of MLL duplication in children older than 1 year, than in other age groups, needs to be confirmed by further studies.

[0282] Ono et al., Cancer Res. 2002 Jan. 15; 62(2):333-7, reported that SEPTIN6, a human homologue to mouse Septin6, is fused to MLL in infant acute myeloid leukemia with complex chromosomal abnormalities involving 11q23 and Xq24.

[0283] Borkhardt et al., Genes Chromosomes Cancer. 2001 September; 32(1):82-8, reported an ins(X;11)(q24;q23) that fuses the MLL and the Septin 6/KIAA0128 gene in an infant with AML-M2.

[0284] Luo et al., Mol Cell Biol. 2001 August; 21(16):5678-87, reported that ELL-associated factor 1 interaction domain is essential for MLL-ELL-induced leukemogenesis.

[0285] Kuwada et al., Cancer Res. 2001 Mar. 15;61(6):2665-9, reported a t(11;14)(q23;q24) that generates an MLL-human gephyrin fusion gene along with a de facto truncated MLL in acute monoblastic leukemia.

[0286] Garcia-Cuellar et al., Oncogene. 2000 Mar. 30; 19(14):1744-51, reported that, ENL, the MLL fusion partner in t(11;19), binds to the c-Ab1 interactor protein 1 (ABI1) that is fused to MLL in t(10;11)+.

[0287] Akao et al., Genes Chromosomes Cancer. 2000 April; 27(4):412-7, reported an analysis of the rearranged genome and chimeric mRNAs caused by a t(6;11)(q27;q23) chromosome translocation involving MLL in an infant acute monocytic leukemia.

[0288] Hayashi et al., Cancer Res. 2000 Feb. 15; 60(4):1139-45, reported a leukemic cell line, SN-1, associated with a t(11;16)(q23;p13.

[0289] So et al., Cancer Genet Cytogenet. 2000 February; 117(1):24-7, analysed MLL-derived transcripts in an infant acute monocytic leukemia having a complex translocation (1;11;4)(q21;q23;p16).

[0290] Kourlas et al., Proc Natl Acad Sci USA. 2000 Feb. 29; 97(5):2145-50, identified a gene at 11q23 encoding a guanine nucleotide exchange factor that fuses with MLL in acute myeloid leukemia.

[0291] Taki et al., Proc Natl Acad Sci USA. 1999 Dec. 7; 96(25):14535-40, reported that AF5q31, an AF4-related gene, is fused to MLL in infant acute lymphoblastic leukemia with an ins(5;11)(q31;q13q23).

[0292] Taki et al., Cancer Res. 1999 Sep. 1; 59(17):4261-5, reported that AF17q25, a putative septin family gene, fuses with the MLL gene in acute myeloid leukemia associatd with a t(11;17)(q23;q25).

[0293] Busson-Le Coniat et al., Leukemia. 1999 February; 13(2):302-6, reported MLL-AF1q fusion resulting from t(1;11) in an acute leukemia.

[0294] Slany et al., Mol Cell Biol. 1998 January; 18(1):122-9, reported on the oncogenic capacity of HRX-ENL that requires the transcriptional transactivation activity of ENL and the DNA binding motifs of HRX.

[0295] Other articles of interest include, Super et al., Genes Chromosomes Cancer. 1997 October; 20(2): 185-95, Identification of complex genomic breakpoint junctions in the t(9;11) MLL-AF9 fusion gene in acute leukemia; Taki et al., Blood. 1997 Jun. 1; 89(11):3945-50, The t(11;16)(q23;p13) translocation in myelodysplastic syndrome fuses the MLL gene to the CBP gene; Taki T et al., Fusion of the MLL gene with two different genes, AF-6 and AF-5alpha, by a complex translocation involving chromosomes 5, 6, 8 and 11 in infant leukemia, Oncogene. 1996 Nov. 21; 13(10):2121-30. Tanabe et al., AF10 is split by MLL and HEAB, a human homolog to a putative Caenorhabditis elegans ATP/GTP-binding protein in an invins(10;11)(p12;q23q12), Blood. 1996 Nov. 1; 88(9):3535-45; Ma et al., LAF-4 encodes a lymphoid nuclear protein with transactivation potential that is homologous to AF-4, the gene fused to MLL in t(4;11) leukemias, Blood. 1996 Jan. 15; 87(2):734-45; Prasad et al., Domains with transcriptional regulatory activity within the ALL1 and AF4 proteins involved in acute leukemia, Proc Natl Acad Sci USA. 1995 Dec. 19; 92(26):12160-4. Baffa et al., Involvement of the ALL-1 gene in a solid tumor, Proc Natl Acad Sci USA. 1995 May 23; 92(11):4922; Mitani, Cloning of several species of MLL/MEN chimeric cDNAs in myeloid leukemia with t(11;19)(q23;p13.1) translocation, Blood. 1995 Apr. 15; 85(8):2017-24; Tse et al., A novel gene, AF1q, fused to MLL in t(1;11) (q21;q23), is specifically expressed in leukemic and immature hematopoietic cells, Blood. 1995 Feb. 1; 85(3):650-6; Chen et al., Acute promyelocytic leukemia: from clinic to molecular biology, Stem Cells. 1995 January; 13(1):22-31. Review; Rubnitz et al., ENL, the gene fused with HRX in t(11;19) leukemias, encodes a nuclear protein with transcriptional activation potential in lymphoid and myeloid cells, Blood. 1994 Sep. 15; 84(6):1747-52; Prasad et al., Leucine-zipper dimerization motif encoded by the AF17 gene fused to ALL-1 (MLL) in acute leukemia, Proc Natl Acad Sci USA. 1994 Aug. 16; 91(17):8107-11; Meerabux et al., Molecular cloning of a novel 11q23 breakpoint associated with non-Hodgkin's lymphoma, Oncogene. 1994 March; 9(3):893-8; Gauwerky et al., Chromosomal translocations in leukaemia, Semin Cancer Biol. 1993 December; 4(6):333-40. Review; Hunger et al., HRX involvement in de novo and secondary leukemias with diverse chromosome 11q23 abnormalities, Blood. 1993 Jun. 15; 81(12):3197-203; Morrissey et al., A serine/proline-rich protein is fused to HRX in t(4;11) acute leukemias, Blood. 1993 Mar. 1; 81(5):1124-31; Tkachuk et al., Involvement of a homolog of Drosophila trithorax by 11q23 chromosomal translocations in acute leukemias, Cell. 1992 Nov. 13; 71(4):691-700.

t(5;12)(q31;p13)

[0296] Yagasaki et al. described a fusion of LACS to a TEL/ETV6 gene in an acute myeloblastic leukemia case having a t(5;12) chromosomal translocation. The human mRNA fusion sequence may be found in NCBI # AF102845 (SEQ ID NO 268). Nt 1-40 are said to derive from the TEL gene on chromosome 12 and nt 41-1172 are said to derive from the LACS gene on chromosome 5.

t(1;12)(q25;p13)

[0297] Cazzaniga et al., Blood 94: 4370-4373 (1999), reported an instance of the tyrosine kinase Abl-related gene ARG fused to ETV6 in an AML-M4Eo patient having a t(1;12)(q25;p13) translocation, and cloned reciprocal chimeric transcripts associated with the event. The ETV6/TEL gene is rearranged in most patients with 12p13 translocations fused to a number of different partners. One of the chimeric proteins consisted of the helix-loop-helix oligomerization domain of ETV6 and the SH2, SH3, and protein tyrosine kinase domains of ABL2. The reciprocal transcript ABL2-ETV6 was also detected in the patient's RNA by RT-PCR, although at a lower expression level.

t(12;15)(p13;q25)

[0298] Wai et al., Oncogene. 2000 Feb. 17; 19(7):906-15, reported an ETV6-NTRK3 gene fusion associated with such translocation.

[0299] Eguchi et al., Blood. 1999 Feb. 15; 93(4):1355-63, reported a similar fusion of ETV6 to neurotrophin-3 receptor TRKC in acute myeloid leukemia with t(12;15)(p13;q25).

[0300] Knezevich et al., Nat Genet. 1998 February; 18(2):184-7; reported an ETV6-NTRK3 gene fusion in congenital fibrosarcoma.

[0301] NCBI # AF125808 (SEQ ID NOs 269 and 270) relate to a human ETS related protein-neurotrophic receptor tyrosine kinase fusion protein (ETV6-NTRK3 fusion) mRNA, partial cds. Nt 12-64 are said to derive from chromosome 12 and nt 65-980 from chromosome 15.

[0302] NCBI # AF041811 (SEQ ID NOs 271 and 272) relate to a human ETS related protein-growth factor receptor tyrosine kinase fusion proteins (ETV6-NTRK3 fusion) mRNA, partial cds. Nt 1-336 are said to derive from chromosome 12 and nt 337-1403 from chromosome 15.

t(1;12)(q21;p13)

[0303] Salomon-Nguyen et al., Proc Natl Acad Sci USA. (2000) 97(12):6757-62, reported a t(1;12)(q21;p13) translocation observed in a case of acute myeloblastic leukemia (AML-M2). At the protein level, the untranslocated TEL copy and, as a result of the t(1;12) translocation, a fusion protein containing the amino-terminal part of TEL and essentially all of the ARNT gene (126110), were expressed. The TEL/ETV6 gene is located at 12p13 and encodes a member of the ETS family of transcription factors. Translocated ETS leukemia (TEL) is frequently involved in chromosomal translocations in human malignancies, usually resulting in the expression of fusion proteins between the amino-terminal part of TEL and either unrelated transcription factors or protein tyrosine kinases. ARNT (aryl hydrocarbon receptor nuclear translocator) belongs to a subfamily of the “basic region helix-loop-helix” (bHLH) protein that shares an additional region of similarity called the PAS (Per, ARNT, SIM) domain. ARNT is the central partner of several heterodimeric transcription factors, including those containing the aryl hydrocarbon (dioxin) receptor (AhR) and the hypoxia-inducible factor 1 alpha (HIF1alpha). Interference with the activity of AhR or HIF1alpha may contribute to leukemogenesis.

[0304] 2. Mutant Protein or Cellular Protein Isoforms

[0305] The second group of target proteins are mutants or isoforms (e.g. splice variants) of normal cellular proteins (usually the products of tumor suppressor genes) that, due to their mutant nature, exhibit a heightened dependence on HSP90 chaperone functions or else increased senstivity, i.e., instability, due to HSP90 inhibitors. The mutant or isoform proteins either (a) have become overtly oncogenic (a “dominant-positive” (DP) effect), or (b) exert a “dominant-negative” (DN) effect on their normal counterpart, thus preventing the normal protein's tumor suppressor activity, and resulting in a net oncogenic effect. The examples are largely illustratd with respect to human sequences, although the person of ordinary skill will appreciate that homologs in other organisms are likewise included within the purview of the invention.

[0306] a. v-src

[0307] One such example of a mutant or isoform protein is human v-src (NCBI #s NM_{—}005417; SEQ ID NOs 273 and 274), which counterpart, c-src (NCBI # XM_{—}044659 (SEQ ID NOs 275 and 276), corresponds to the normal cellular gene product. As described above, proteins with a heightened dependence on HSP90 can be identified by their enhanced sensitivity to degradation induced by HSP90 inhibitors, such as the ansamycin antiobiotic geldanamycin. Ansamycins and other HSP90 inhibitors were originally isolated on the basis of their ability to revert v-src transformed fibroblasts (Uehara, Y. et al., 1985, Supra, 76: 672-675) and this reversal was correlated with the functional inactivation of the v-src protein (Uehara, Y. et al., 1986, Mol. Cell. Biol., 6: 2198-2206). This effect was subsequently reported to be caused by the ubiquitin/proteosome-dependent degradation of the transforming v-src protein as a result of inhibition of HSP90 function by geldanamycin (Whitesell, L., et al., 1994, supra). Finally, a recent study compared the rate and potency of degradation of v-src and c-src proteins after treatment of Rous sarcoma virus-transformed 3T3 fibroblasts with the ansamycin geldanamycin. In this study, the oncogenic mutant v-src protein was almost 100% degraded within 6 hours (An, W et al, 2000, supra, see FIG. 2), whereas the normal cellular counterpart, c-src, was largely unaffected even after 20 hours of the same treatment (An, W et al, 2000, supra, see FIG. 4).

[0308] HSP90 inhibitors can selectively induce degradation of a wide range of mutated or otherwise aberrant proteins that cause or exacerbate a disease, and that have an apparent heightened dependence on HSP90.

[0309] b. RET

[0310] An example of a dominant proto-oncogene encoding a signaling protein that is mutated in certain human cancers giving rise to constitutively active structurally abnormal cellular proteins is the RET proto-oncogene (NCBI # P07949; SEQ ID NO 277) in multiple endocrine neoplasia Type 2 (MEN-2). RET encodes a receptor tyrosine kinase whose ligand is presently unidentified (Kolibaba, K, et al, 1997, Supra). The germline mutations found in MEN-2A patients (Cys634→Arg/Tyr, similar mutations at Cys609, 611, 618 and 620) alter the tertiary structure of the protein resulting in homodimerization and activation of the kinase domain. The commonly observed mutation in MEN-2B, Met918→Thr, alters the kinase domain structure, causing activation directly. Both of these pathways involve alterations in protein conformation, which again implicates HSP90 and underscores the broad utility of the invention.

[0311] c. p53

[0312] Another example of a mutant, oncogenic variant group of a normal cellular protein is tumor suppressor antigen p53. The wild-type protein and mRNA sequences for p53 are found in NCBI accession # M14695 (SEQ ID NOs 278 and 279). However, numerous mutations in p53 are known to occur and represent the most common molecular genetic defects found in human cancers (Harris, C et al, 1993, N. Engl. J. Med. 329:1318-1327). A mutant p53 protein was reportedly degraded in cells following treatment with geldanamycin, but wild type p53 exhibited no such, or only minimal, degradation (Blagosklonny, M et al, 1995, Oncogene, 11:933-939). Unlike the situation described above for v-src, most p53 mutations are “loss of function” effects, i.e., the mutation results in the inability of the protein to perform one or more of its normal functions. Thus, in a tumor cell that has an intact p53 allele and a loss of function mutant allele, simply causing the mutant form to be degraded will not change cellular behavior. However, if the mutant protein by some mechanism inhibits the action of its coexpressed normal counterpart inside tumor cells, then degrading it will affect cellular behaviour.

[0313] This “dominant-negative” (DN) effect has been shown to occur in cells harboring certain p53 mutants, and by several different mechanisms. For example, a mutant may afford tighter DNA binding without transactivation (Chene, P, et al, 1999, Int. J. Cancer. 82:17-22). This type of p53 mutant does not exhibit “classical” DN activity unless the mutation confers an increased affinity for DNA, because the mutant stoichiometrically competes with the wild type (WT) protein for binding to DNA. Another example is inhibition of tetramerization by incorporation of one or more mutant p53s into a complex with WT proteins (Deb, D et al, 1999, Int. J. Oncol. 15:413-422, Rollenhagen, C et al, 1998, Int. J. Cancer 78:372-376). Yet a third example concerns “prion-like” activity, in which a mutant protein forces a WT protein into a mutant conformation that then impairs its ability to bind to DNA and/or transactivate p53 target genes (Chene, P, 1998, J. Mol. Biol. 281:205-209)

[0314] Increased stability of mutants relative to WT proteins causes them to accumulate and override normal p53 biology. This is counterintuitive given the fact that p53 has a built-in negative feedback loop on its own transcription (via induction of the mdm-2 protein, which subsequently targets p53 for degradation). If the increased stability of a given mutant were due solely to failure to transactivate mdm-2, then accumulation of the mutant would not occur in the presence of a WT allele (Blagosklonny, M, 2000, FASEB J 14:1901-1907) because this protein would initiate negative feedback mechanisms that would be expected to act on both WT and mutant p53.

[0315] On the other hand, an independent mechanism favoring mutant accumulation (e.g. protection by association with HSP90 (Smith, D, et al, 1998, supra; Sepehrnia, B, et al, 1996, J. Biol. Chem. 271:15084-15090) would permit a “recessive” mutant to become in sufficient excess of the transactivating form to result in progressive inhibition of the negative feedback pathways. In this situation, the mutant would have a net DN effect due to progressive accumulation of a stoichiometric antagonist, and selective degradation of that mutant by inhibition of HSP90 activity would be expected to restore normal p53 function. Thus, in most or all cases, a DN phenotype produced by mutant p53 is secondary to the activity of HSP90 and inhibition of HSP90 function with 17-AAG or other HSP90 ATP binding site antagonists would prevent the expression of the DN phenotype and so rescue normal p53 function.

[0316] i. Dominant Negative p53 Mutants

[0317] A list of exemplary p53 mutations, including examples of structurally-abnormal proteins, dominant-negative proteins, prion-like proteins, and mutants with various combinations of these properties, follows:
[0318] Chene et al, 1999, Int. J. Cancer. 82:17-22; Y236delta (deletion of codon 236) resulted in a conformationally altered & dominant-negative phenotype.
[0319] Preuss et al, 2000, Int. J. Cancer 88:162-171); C174Y (Cys→Tyr) (rat) is dominant-negative, non-transactivating. The same mutation at position 176 is predicted to have a similar effect in humans, as the respective homologs have close correlative structural similarities at these positions.
[0320] Srivastava et al, 1993, Oncogene 8:2449-2456); M133T (Met→Thr), G245D (Gly→Asp), and E258K (Glu→Lys) all display conformationally altered, dominant-negative, prion-like displaying activity, in that co-incubation with WT p53 converts it into the mutated conformation.
[0321] Deb et al, 1999, Int. J. Oncol. 15:413-422); 1-293delta (deletion of codons 1-293) exhibited dominant negative DNA binding characteristics without transactivating activity.
[0322] Frebourg et al, 1992, Proc. Natl. Acad. Sci. 89:6413-6417; G245C (Gly→Cys), R248W (Arg→Trp), E258K (Glu→Lys), and R282W (Arg→Try) all independently display conformationally altered, dominant-negative activity.
[0323] Brachmann et al, 1996, Proc. Natl. Acad. Sci. 93:4091-4095; novel yeast assay used to identify dominant-negative p53 mutants that have also been found in human tumors, specifically implicating codons 132, 135, 151, 158, 176, 179, 236, 241, 242, 244, 245, 246, 248, 257, 265, 273, 277, 278, 279, 280, and 281. Of particular interest because they exhibited the greatest dominant-negative activity were mutants at codons 241, 242, 244, 245, 246, 248, 277, 278, 279, 280, and 281.
[0324] Blagosklonny et al, 1995, Oncogene 11:933-939); p53s mutated at the following codons exhibited disrupted conformations were dominant negative, and sensitive to geldanamycin: R175H (Arg→His), 194, 213, 223, 248, 274, R280K (Arg→Lys).
[0325] Aurelio et al, 2000, Mol. Cell. Biol. 20:770-778; without identifying conformational status, the following mutants were identified as dominant-negative for transactivation of apoptotic signals (Bax), but not growth arrest signals (p21^{WAF}): V143A (Val→Ala), R175H (Arg→His), G245C (Gly→Cys), R248W (Arg→Trp), R273H (Arg→His), K305M (Lys→Met), G325V (Gly→Val).
[0326] Marutani et al, 1999, Cancer Res. 59:4765-4769; yeast-based transdominance assay used to identify dominant-negative mutations at 16 codons: R156H (Arg→His), R175H (Arg→His), P177S (Pro→Ser), H178P (His→Pro), H179R (His→Arg), R181P (Arg→Pro), 238-9delta (deletion of codons 238 & 239), G245S (Gly→Ser), G245D (Gly→Asp), M246R (Met→Arg), R248Q (Arg→Gln), R249S (Arg→Ser), R273H (Arg→His), R273C (Arg→Cys), R273L (Arg→Leu), D281Y (Asp→Tyr).

[0327] ii. Dominant Positive p53 Mutants

[0328] In addition to dominant-negative mutations, some p53 mutations actually transactivate inappropriate gene expression, contributing to oncogenesis; i.e. a positive tumor promoting effect. See Park et al, 1994, Oncogene 9:1899-1906. This type of mutation is particularly suited to the approach embodied in the present invention because, unlike in the dominant-negative situation, the presence or absence of a normal allele of the tumor suppressor gene is irrelevant to the therapeutic utility of the HSP90 inhibitor. In other words, because the mutant p53 itself contributes to the malignant process, destruction of the mutant protein by inhibition of HSP90 is expected to have direct therapeutic value. A good example is C176Y (Cys→Tyr), as reported by Preuss, U et al, 2000, Int. J. Cancer 88:162-171. This mutant induces rather than represses the cellular fos promoter, resulting in activation of oncogenic signaling pathways. The biology of “dominant-positive” p53 mutants is reviewed in van Oijen et al, 2000, Clin. Cancer Res. 6:2138-2145. Other examples of mutations of p53 that give rise to tumorigenic phenotypes include, but are not limited to, Phe-132, Val-135, Ala-143, His-175, His-179, Trp-248, Ser-249, Leu-273, His-273 and Gly-281. Of particular interest, because these mutant proteins have been shown to be disrupted conformationally, are Ala-143, His-175, His-179 and Gly-281 (van Oijen, M, et al, 2000, supra). Particular subsets of the above list of tumor-promoting mutants have been shown to exert their oncogenic effects via transactivation of one or more of the growth promoting genes bFGF, IGF-1, EGF-R, and c-myc. Alternatively or conjunctively, some gain-of-function mutants, including Ala-143, His-175, Trp-248, Ser-249, His-273, and Gly-281, contribute to tumor resistance to chemotherapeutic drugs by transactivating the MDR gene.

[0329] As described above, in the case of this type of mutant, in heterozygous cells, selective degradation of that mutant by inhibition of HSP90 activity will restore normal p53 function. Furthermore, in cases of loss of heterozygosity (LOH), where the tumor has progressed further and the second, normal p53 allele has become mutated or lost, selective degradation of the mutated protein by inhibition of HSP90 chaperoning will result in a therapeutic effect. In this case the p53 mutant is behaving as an oncoprotein, as in the bcr-abl and v-src examples described above.

[0330] d. Other Tumor Suppressor Variant Proteins

[0331] In addition to p53 itself, additional members of the p53 family of tumor suppressor proteins have also been implicated in human cancer progression. Although p53 itself is a fairly ubiquitous protein, other family members have more restricted tissue distributions. In particular tissues and tumors derived therefrom, closely related non-p53 proteins serve the same role as p53 itself. In these tumors, a truncated variant, termed deltaN, predominates over the full-length form. The truncated and/or deletent isoform is able to compete with the full length form for DNA binding, but does not itself have any transactivating activity. Thus, the deltaN form inhibits the tumor suppressor activity of the full length form, so that if the variant is degraded as a result of inhibition of HSP90 activity, an antitumor effect or drug-sensitizing effect will result. The deltaN isoform will have a heightened dependence on HSP90.

[0332] The following three examples concern the specific tumor suppressor proteins p51, p63, and p73. p51 and p63 are each produced from a common 15 exon gene, p73L/p63/p51/p40/KET, and all three proteins exhibit various isoforms, including deltaN isoforms that lack N-terminal transactivation (TA) domains and which are implicated in various carcinomas treatable according to methods of the invention. The many isotypes possible for these gene products are attributable, at least in part, to complex alternative splicing events and, in the case of p63, multiple promoters. For each, it is understood that isoforms may exist and specific isoform expression patterns may vary as between different tissue types, and as between normal versus carcinomic or neoplastic tissues.

[0333] i. deltaN p51

[0334] Osada et al. described the cloning and functional analysis of human p51, which structurally and functionally resembles p53. Nature Med. 4: 839-843 (1998). Two major splicing variant gene products have been detected in normal cells, p51A and p51B. p51A (aka TAp63gamma; NCBI #s AB016072 (SEQ ID NOs 280 and 281) is a 448-amino-acid protein with a molecular weight of 50.9 kDa; and p51B (aka TAp63alpha; AB016073 (SEQ ID NOs 282 and 283) is a 641-amino-acid protein with a molecular weight of 71.9 kDa. Other encoded isoforms have also been observed, including, e.g., those denoted in the following list: p51 delta (NCBI # AF116771 (SEQ ID NOs 284 and 285), delNdelta (NCBI # AAF43493 (SEQ ID NOs 286 and 287), delNbeta (NCBI # AAF43492 (SEQ ID NOs. 288 and 289), delNalpha (NCBI # AAF43491 (SEQ ID NOs. 290 and 291), delNgamma (NCBI # AAF43490; SEQ ID NOs 292 and 293), TAp63delta (NCBI # AAF43489; SEQ ID NOs 294 and 295), TAp63beta (NCBI # AAF43488 (SEQ ID NOs 296 and 297), TAp63alpha (NCBI #AAF43487 (SEQ ID NOs 298 and 299), and TAp63gamma (NCBI # AAF43486 (SEQ ID NOs 300 and 301). The TA isoforms contain a transactivation domain (encoded by exon 3′) for transactivating p53; the deltaN forms do not. The absence of the TA domain is thought to render those particular isoforms nonfunctional, thereby contributing to carcinoma etiology at least when those isoforms are expressed in abnormally high amounts. Normal expresson patterns of the various isotypes is known to vary as between different tissue types. In lung cancer specimens, for example, multiple deltaN (“TA-less”) forms of the p51 protein were found to be overexpressed in 34 of 44 lung cancer specimens analysed (77%). (Tani, M et al, 1999, Neoplasia 1:71-79).

[0335] ii. deltaN p63

[0336] In certain bladder and nasopharyngeal carcinomas, various isoforms of the p53 family member p63 are expressed, and one or more of the deltaN forms, e.g., deltaN p63beta (NCBI #AF075433; SEQ ID NOs 302 and 303), deltaN p63gamma (NCBI #AF075429; SEQ ID NOs 304 and 305), and deltaN p63 alpha (NCBI #AF075431 (SEQ ID NOs 306 and 307) predominate and dominantly inhibit the transactivating activity of the full length TA-containing forms. (Park, B et al, 2000, Cancer Res. 60:3370-3374). The TA-containing isoforms are TA p63 beta (NCBI #AF075432; SEQ ID NOs 308 and 309) and TA p63 alpha (NCBI #AF075430; SEQ ID NOs 310 and 311). In nasopharyngeal carcinoma, the deltaN isoform predominance is even more pronounced (Crook, T et al, 2000, Oncogene 19:3439-3444). The p63 protein is also important in UV-B-induced skin cancer. Overexpression of the deltaN isoform of p63 in transgenic mouse epidermis was found to block apoptosis induced by WT p53 in response to LW-B irradiation (Liefer, K, et al, 2000, Cancer Res. 60:4016-4020). Mutations in the p63 gene have also been reported in epidermal carcinomas. See, e.g., Osada et al, 1998, Nat. Med. 4:839-843 and NCBI #NM003722 (SEQ ID NOs 312 and 313).

[0337] iii. deltaN p73

[0338] The p73 protein is important in ovarian carcinoma—when compared to primary cultures of normal ovarian epithelial cells, 57% of ovarian carcinoma cell lines, 71% of invasive tumors and 92% of borderline tumor tissues were found to express elevated levels of deltaN p73 (Ng, S et al, 2000, Oncogene 19:1885-1890). Full-length p73 and isoforms thereof are displayed in NCBI # Y11416 (SEQ ID NOs 314, 315, 316, and 317), along with splice and allelic variations, including splice variations responsible for the deltaN isoform.

[0339] Applicants expect that all of the foregoing truncated p53 family members are structurally unstable, dependent on HSP90 and/or exhibit increased sensitivity to HSP90 inhibitors relative to their wild-type counterparts. Applicants further anticipate that other isomeric/aberrant forms of proteins may exhibit similar behavior(s).

[0340] The methods of the present invention may be used on mammals, preferably humans, either alone or in combination with other therapies or methods useful for treating a particular cell proliferative disorder or viral infection.

[0341] The use of the present invention is facilitated by first identifying whether the cell proliferation disorder or viral infection is accompanied by cells which contain expression of a fusion oncoprotein or a mutated cellular protein with heightened dependence on HSP90 (or a fusion protein or mutant protein that, by one skilled in the art, would be predicted to have heightened dependence on HSP90). Once such disorders are identified, patients suffering from such a disorder can be identified by analysis of their symptoms by procedures well known to medical doctors. Such patients are treated as described herein.

[0342] 3. Representative Assays for Diagnosing Proliferative Disorders

[0343] Many different types of methods are known in the art that can be used to diagnose a proliferative disorder characterized by an aberrant protein, e.g., those that involve determining protein concentrations and measuring or predicting the level of proteins within cells, tissues, and fluid samples. Indirect techniques include nucleic acid hybridization and amplification using, e.g., polymerase chain reaction (PCR). These techniques are known to the person of skill and are discussed, e.g., in Sambrook, Fritsch & Maniatis, Molecular Cloning: A Laboratory Manual, Second Edition (1989) Cold Spring Harbor Laboratory Press, Cold Spring Harbor, N.Y., Ausubel, et al., Current Protocols in Molecular Biology, John Wiley & Sons, NY, 1994. Because the nucleic acid sequence is known, and because the aberrant proteins have a foundational basis in the nucleic acid sequence, the specific sequences found for aberrant proteins can also be used to generate primers and probes that span the novel junction (in the case of fusion proteins), e.g., using RT-PCR and other procedures. For non-fusion proteins, as well as fusion proteins, stringent hybridization and/or PCR can be used diagnostically.

[0344] Polyclonal or monoclonal antibodies can also be generated based on the specific sequence of the aberrant protein (in the case of fusion proteins, preferably the novel amino acid junction itself) using routine techniques. See Harlow et al., Antibodies: A Laboratory Manual, 2nd Ed; Cold Spring Harbor Laboratory Press, Cold Spring Harbor, N.Y. (1988).

[0345] Examples of diagnostic methods of that can be used with the invention include those reviewed in Slominski, A et al, 1999, Arch. Pathol. Lab. Med. 123:1246-1259, O'Connor et al, 1999, Leuk. Lymphoma 33:53-63, and Scarpa, A et al, 1997, Leuk. Lymphoma 26 Suppl. 1:77-82. A further list of methods that is intended to be exemplary but not to limit the scope of the invention, follows.
[0346] O'Connor et al, 1997, Br. J. Haematol. 99:597-604 described that the t(5;17)(q22:q21) translocation found in APL produces a PML-RAR fusion protein that can be specifically detected with the 5E10 Mab by fluorescence activated cell sorting (FACS).
[0347] Le et al, 1998, Eur. J. Haematol. 60:217-225 reported that the AML-ETO fusion protein that arises in t(8;21) AML can be identified in tumor cells with ETO-specific polyclonal antibodies using western blotting. The normal ETO protein (70 kD) can be distinguished from the AML-ETO fusion protein (94 kD) on the basis of their differing mobilities in the gel.
[0348] Viswanatha et al, 1998, Blood 91:1882-1890 found that the CBFB-SMMHC fusion protein present in Inv(16)(p13q32) and t(16:16)(p13;q32) AML can be specifically detected with a polyclonal antibody specific for a junctional epitope using FACS of permeabilized cells.

[0349] In the case of dominantly-acting mutant proteins, such as mutant RET or gain-of-function mutants of p53, the presence of the specific point mutations known to give rise to the dominant mutant may be identified by the molecular genetic techniques listed above in reference to fusion proteins. Numerous reviews of germline and acquired p53 mutations detected in human cancers have been published (see, e.g., Hainuit, P, et al, 2000, Adv. Cancer Res. 77:81-137).

[0350] In the case of dominant-negative p53 mutations, several other diagnostic criteria may be employed to identify patients susceptible of treatment with the current invention. First, molecular genetic methodologies such as Southern Blotting or PCR can be used to detect the presence of a specific point mutation known to give rise to a dominant-negative version of p53. Similarly, FISH may be employed to detect specific point mutations known to confer conformational changes and/or dominant-negative activity (Villadsen R et al, 2000, Cancer Genet. Cytogenet. 116:28-34). Other methods include allele-specific PCR (AS-PCR) and chromosome flow cytometry (Villadsen et al, Supra).

[0351] Alternatively, if the mutation in question has not previously been shown to generate a dominant-negative p53 mutant, a cell-based transdominance assay may be used to determine the phenotype (Frebourg, T et al, 1992, Proc. Natl. Acad. Sci. 89:6413-6417). In this assay, p53-null SAOS-2 cells are co-transfected with WT p53 and the test mutant. The normal p53 protein causes the cells to undergo apoptosis, from which fate they can be rescued by a p53 mutant that has a dominant negative activity. In these cases, further genetic analyses may be performed to confirm the presence of an intact non-mutant allele. In addition, antibodies have been raised that distinguish between p53 proteins with normal versus mutant conformation. These latter p53s have a heightened dependence upon HSP90, and so fall within the scope of the present invention. Specifically, PAb240, from (Oncogene Sciences, Inc.) OSI, is mutant conformation-specific. The corresponding antibody specific for WT is PAb1620, also for OSI (Chene, P, et al, 1999, supra).

[0352] In the case of cell proliferative disorders arising due to unwanted proliferation of non-cancer cells, the level of the fusion protein or mutated cellular protein is compared to that level occurring in the general population (e.g., the average level occurring in the general population of people or animals excluding those people or animals suffering from a cell proliferative disorder). If the unwanted cell proliferation disorder is characterized by an abnormal level of a fusion protein than occurrs in a normal population, or by the presence of a mutated cellular protein, such as p53, then the disorder is a candidate for treatment using the methods described herein. In a preferred example, the mutated protein is p53 and the proliferative disorder is rheumatoid arthritis. In a particularly preferred example, the p53 mutations may include, but are not limited to, N239S (Asn→Ser), C176R (Cys-Arg) and R213* (Arg→stop) and the mutant forms exert apparent dominant-negative activity over the wild-type protein. Han, Z et al, 1999, Arthritis Rheum. 42:1088-1092).

[0353] 4. Preparation and Administration of Pharmaceutical Compositions

[0354] Geldanamycin may be prepared according to U.S. Pat. No. 3,595,955 using the subculture of Streptomyces hygroscopicus that is on deposit with the U.S. Department of Agriculture, Northern Utilization and Research Division, Agricultural Research, Peoria, Ill., USA, accession number NRRL 3602. It is also available from Sigma/Aldrich Chemical Co., St. Louis, Mo., USA. Numerous derivatives of this compound, including herbimycin A, macbecin, and 17-AAG may be fashioned as specified in U.S. Pat. Nos. 4,261,989, 5,387,584, and 5,932,566, or according to standard techniques known in the art. Other useful ansamycin derivatives appear in Applicants' co-pending and commonly owned provisonal application entitled, “Ansamycins Having Improved Pharmacological and Biological Properties,” filed Feb. 8, 2002, Serial Number to be determined, and herein incorporated by reference in its entirety.

[0355] Those of ordinary skill in the art are familiar with formulation and administration techniques that can be employed in use of the invention, e.g., as discussed in Goodman and Gilman's The Pharmacological Basis of Therapeutics, current edition; Pergamon Press; and Remington's Pharmaceutical Sciences (current edition.) Mack Publishing Co., Easton, Pa.

[0356] The compounds utilized in the methods of the instant invention may be administered either alone or in combination with pharmaceutically acceptable carriers, excipients or diluents, in a pharmaceutical composition, according to standard pharmaceutical practice. The compounds can be administered orally or parenterally, including the intravenous, intramuscular, intraperitoneal, subcutaneous, rectal and topical routes of administration.

[0357] The pharmaceutical compositions used in the methods of the instant invention can contain the active ingredient in a form suitable for oral use, for example, as tablets, troches, lozenges, aqueous or oily suspensions, dispersible powders or granules, emulsions, hard or soft capsules, or syrups or elixirs. Compositions intended for oral use may be prepared according to any method known to the art for the manufacture of pharmaceutical compositions and such compositions may contain one or more agents selected from the group consisting of sweetening agents, flavoring agents, coloring agents and preserving agents in order to provide pharmaceutically elegant and palatable preparations. Tablets contain the active ingredient in admixture with non-toxic pharmaceutically acceptable excipients which are suitable for the manufacture of tablets. These excipients may be, for example, inert diluents, such as calcium carbonate, sodium carbonate, lactose, calcium phosphate or sodium phosphate; granulating and disintegrating agents, such as microcrystalline cellulose, sodium crosscarmellose, corn starch, or alginic acid; binding agents, for example starch, gelatin, polyvinyl-pyrrolidone or acacia, and lubricating agents, for example, magnesium stearate, stearic acid or talc. The tablets may be uncoated or they may be coated by known techniques to mask the unpleasant taste of the drug or delay disintegration and absorption in the gastrointestinal tract and thereby provide a sustained action over a longer period. For example, a water soluble taste masking material such as hydroxypropylmethyl-cellulose or hydroxypropylcellulose, or a time delay material such as ethyl cellulose, cellulose acetate butyrate may be employed.

[0358] Formulations for oral use may also be presented as hard gelatin capsules wherein the active ingredient is mixed with an inert solid diluent, for example, calcium carbonate, calcium phosphate or kaolin, or as soft gelatin capsules wherein the active ingredient is mixed with water soluble carrier such as polyethyleneglycol or an oil medium, for example peanut oil, liquid paraffin, or olive oil.

[0359] Aqueous suspensions contain the active material in admixture with excipients suitable for the manufacture of aqueous suspensions. Such excipients are suspending agents, for example sodium carboxymethylcellulose, methylcellulose, hydroxypropylmethyl-cellulose, sodium alginate, polyvinyl-pyrrolidone, gum tragacanth and gum acacia; dispersing or wetting agents may be a naturally-occurring phosphatide, for example lecithin, or condensation products of an alkylene oxide with fatty acids, for example polyoxyethylene stearate, or condensation products of ethylene oxide with long chain aliphatic alcohols, for example heptadecaethyleneoxycetanol, or condensation products of ethylene oxide with partial esters derived from fatty acids and a hexitol such as polyoxyethylene sorbitol monooleate, or condensation products of ethylene oxide with partial esters derived from fatty acids and hexitol anhydrides, for example polyethylene sorbitan monooleate. The aqueous suspensions may also contain one or more preservatives, for example ethyl, or n-propyl p-hydroxybenzoate, one or more coloring agents, one or more flavoring agents, and one or more sweetening agents, such as sucrose, saccharin or aspartame.

[0360] Oily suspensions may be formulated by suspending the active ingredient in a vegetable oil, for example arachis oil, olive oil, sesame oil or coconut oil, or in mineral oil such as liquid paraffin. The oily suspensions may contain a thickening agent, for example beeswax, hard paraffin or cetyl alcohol. Sweetening agents such as those set forth above, and flavoring agents may be added to provide a palatable oral preparation. These compositions may be preserved by the addition of an anti-oxidant such as butylated hydroxyanisol or alpha-tocopherol.

[0361] Dispersible powders and granules suitable for preparation of an aqueous suspension by the addition of water provide the active ingredient in admixture with a dispersing or wetting agent, suspending agent and one or more preservatives. Suitable dispersing or wetting agents and suspending agents are exemplified by those already mentioned above. Additional excipients, for example sweetening, flavoring and coloring agents, may also be present. These compositions may be preserved by the addition of an anti-oxidant such as ascorbic acid.

[0362] The pharmaceutical compositions used in the methods of the instant invention may also be in the form of oil-in-water emulsions. The oily phase may be a vegetable oil, for example olive oil or arachis oil, or a mineral oil, for example liquid paraffin or mixtures of these. Suitable emulsifying agents may be naturally-occurring phosphatides, for example soy bean lecithin, and esters or partial esters derived from fatty acids and hexitol anhydrides, for example sorbitan monooleate, and condensation products of the said partial esters with ethylene oxide, for example polyoxyethylene sorbitan monooleate. The emulsions may also contain sweetening, flavoring agents, preservatives and antioxidants.

[0363] Syrups and elixirs may be formulated with sweetening agents, for example glycerol, propylene glycol, sorbitol or sucrose. Such formulations may also contain a demulcent, a preservative, flavoring and coloring agents and antioxidant.

[0364] The pharmaceutical compositions may be in the form of sterile injectable aqueous solutions. Among the acceptable vehicles and solvents that may be employed are water, Ringer's solution and isotonic sodium chloride solution.

[0365] The sterile injectable preparation may also be a sterile injectable oil-in-water microemulsion where the active ingredient is dissolved in the oily phase. For example, the active ingredient may be first dissolved in a mixture of soybean oil and lecithin. The oil solution then introduced into a water and glycerol mixture and processed to form a microemulation.

[0366] The injectable solutions or microemulsions may be introduced into a patient's blood-stream by local bolus injection. Alternatively, it may be advantageous to administer the solution or microemulsion in such a way as to maintain a constant circulating concentration of the instant compound. In order to maintain such a constant concentration, a continuous intravenous delivery device may be utilized. An example of such a device is the Deltec CADD-PLUS™ model 5400 intravenous pump.

[0367] The pharmaceutical compositions may be in the form of a sterile injectable aqueous or oleagenous suspension for intramuscular and subcutaneous administration. This suspension may be formulated according to the known art using those suitable dispersing or wetting agents and suspending agents which have been mentioned above. The sterile injectable preparation may also be a sterile injectable solution or suspension in a non-toxic parenterally-acceptable diluent or solvent, for example as a solution in 1,3-butane diol. In addition, sterile, fixed oils are conventionally employed as a solvent or suspending medium. For this purpose any bland fixed oil may be employed including mono- or diglycerides. In addition, fatty acids such as oleic acid find use in the preparation of injectables.

[0368] The HSP90 inhibitors used in the methods of the present invention may also be administered in the form of a suppositories for rectal administration of the drug. These compositions can be prepared by mixing the inhibitors with a suitable non-irritating excipient which is solid at ordinary temperatures but liquid at the rectal temperature and will therefore melt in the rectum to release the drug. Such materials include cocoa butter, glycerinated gelatin, hydrogenated vegetable oils, mixtures of polyethylene glycols of various molecular weights and fatty acid esters of polyethylene glycol.

[0369] For topical use, creams, ointments, jellies, solutions or suspensions, etc., containing an HSP90 inhibitor can be used. (As used herein, topical application can include mouth washes and gargles.)

[0370] The compounds used in the methods of the present invention can be administered in intranasal form via topical use of suitable intranasal vehicles and delivery devices, or via transdermal routes, using those forms of transdermal skin patches well known to those of ordinary skill in the art. To be administered in the form of a transdermal delivery system, the dosage administration will, of course, be continuous rather than intermittent throughout the dosage regimen.

[0371] The HSP90 inhibitors used in the instant invention may also be co-administered with other well known therapeutic agents that are selected for their particular usefulness against the condition that is being treated. For example, the instant compounds may be useful in combination with known anti-cancer and cytotoxic agents. The instant compounds may also be useful in combination with other inhibitors of parts of the signaling pathway that links cell surface growth factor receptors to nuclear signals initiating cellular proliferation.

[0372] The methods of the present invention may also be useful with other agents that inhibit angiogenesis and thereby inhibit the growth and invasiveness of tumor cells, including, but not limited to VEGF receptor inhibitors, angiostatin and endostatin.

[0373] When a HSP90 inhibitor used in the methods of the present invention is administered into a human subject, the daily dosage will normally be determined by the prescribing physician with the dosage generally varying according to the age, weight, and response of the individual patient, as well as the severity of the patient's symptoms.

[0374] In one exemplary application, a suitable amount of a HSP90 inhibitor is administered to a mammal undergoing treatment for cancer. Administration occurs in an amount of each type of inhibitor of between about 0.1 mg/kg of body weight to about 60 mg/kg of body weight per day, preferably of between 0.5 mg/kg of body weight to about 40 mg/kg of body weight per day. A particular therapeutic dosage that comprises the instant composition includes from about 0.01 mg to about 1000 mg of a HSP90 inhibitor. Preferably, the dosage comprises from about 1 mg to about 1000 mg of a HSP90 inhibitor.

[0375] Examples of antineoplastic agents which can be used in combination with the methods of the present invention include, in general, alkylating agents, anti-metabolites; epidophyllotoxin; an antineoplastic enzyme; a topoisomerase inhibitor; procarbazine; mitoxantrone; platinum coordination complexes; biological response modifiers and growth inhibitors; hormonal/anti-hormonal therapeutic agents and haematopoietic growth factors.

[0376] Exemplary classes of antineoplastic agents further include the anthracycline family of drugs, the vinca drugs, the mitomycins, the bleomycins, the cytotoxic nucleosides, the epothilones, discodermolide, the pteridine family of drugs, diynenes and the podophyllotoxins. Particularly useful members of those classes include, for example, carminomycin, daunorubicin, aminopterin, methotrexate, methopterin, dichloromethotrexate, mitomycin C, porfiromycin, 5-fluorouracil, 6-mercaptopurine, gemcitabine, cytosine arabinoside, podophyllotoxin or podophyllotoxin derivatives such as etoposide, etoposide phosphate or teniposide, melphalan, vinblastine, vincristine, leurosidine, vindesine, leurosine, paclitaxel and the like. Other useful antineoplastic agents include estramustine, carboplatin, cyclophosphamide, bleomycin, gemcitibine, ifosamide, melphalan, hexamethyl melamine, thiotepa, cytarabin, idatrexate, trimetrexate, dacarbazine, L-asparaginase, camptothecin, CPT-11, topotecan, ara-C, bicalutamide, flutamide, leuprolide, pyridobenzoindole derivatives, interferons and interleukins.

[0377] Preferably, the pharmaceutical preparation is in unit dosage form. In such form, the preparation is subdivided into unit doses containing appropriate quantities of the active component, e.g., an effective amount to achieve the desired purpose.

[0378] The quantity of active compound in a unit dose of preparation may be varied or adjusted from about 0.1 mg to 1000 mg, preferably from about 1 mg to 300 mg, more preferably 10 mg to 200 mg, according to the particular application.

[0379] The actual dosage employed may be varied depending upon the requirements of the patient and the severity of the condition being treated. Determination of the proper dosage for a particular situation is within the skill of the art. Generally, treatment is initiated with smaller dosages which are less than the optimum dose of the compound. Thereafter, the dosage is increased by small amounts until the optimum effect under the circumstances is reached. For convenience, the total daily dosage may be divided and administered in portions during the day if desired.

[0380] The amount and frequency of administration of the HSP90 inhibitors used in the methods of the present invention and, if applicable, other chemotherapeutic agents and/or radiation therapy will be regulated according to the judgment of the attending clinician (physician) considering such factors as age, condition and size of the patient as well as severity of the disease being treated. A dosage regimen of the HSP90 inhibitors can be intravenous administration of from 1 mg to 5 gm/day, more preferably 10 mg to 2000 mg/day, more preferably still 10 to 1000 mg/day, and most preferably 50 to 600 mg/day, in one or more preferably two) doses, to block tumor growth.

[0381] The chemotherapeutic agent and/or radiation therapy can be administered according to therapeutic protocols well known in the art. It will be apparent to those skilled in the art that the administration of the chemotherapeutic agent and/or radiation therapy can be varied depending on the disease being treated and the known effects of the chemotherapeutic agent and/or radiation therapy on that disease. Also, in accordance with the knowledge of the skilled clinician, the therapeutic protocols (e.g., dosage amounts and times of administration) can be varied in view of the observed effects of the administered therapeutic agents (i.e., antineoplastic agent or radiation) on the patient, and in view of the observed responses of the disease to the administered therapeutic agents.

[0382] Also, in general, the HSP90 inhibitor and the chemotherapeutic agent do not have to be administered in the same pharmaceutical composition, and may, because of different physical and chemical characteristics, have to be administered by different routes. For example, the HSP90 inhibitor may be administered orally to generate and maintain good blood levels, while the chemotherapeutic agent may be administered intravenously. The determination of the mode of administration and the advisability of administration, where possible, in the same pharmaceutical composition, is well within the knowledge of the skilled clinician. The initial administration can be made according to established protocols known in the art, and then, based upon the observed effects, the dosage, modes of administration and times of administration can be modified by the skilled clinician.

[0383] The particular choice of HSP90 inhibitor, and chemotherapeutic agent and/or radiation will depend upon the diagnosis of the attending physicians and their judgment of the condition of the patient and the appropriate treatment protocol.

[0384] The HSP90 inhibitor, and chemotherapeutic agent and/or radiation may be administered concurrently (e.g., simultaneously, essentially simultaneously or within the same treatment protocol) or sequentially, depending upon the nature of the proliferative disease, the condition of the patient, and the actual choice of chemotherapeutic agent and/or radiation to be administered in conjunction (i.e., within a single treatment protocol) with the HSP90 inhibitor.

[0385] If the HSP90 inhibitor, and the chemotherapeutic agent and/or radiation are not administered simultaneously or essentially simultaneously, then the optimum order of administration of the HSP90 inhibitor, and the chemotherapeutic agent and/or radiation, may be different for different tumors. Thus, in certain situations the HSP90 inhibitor may be administered first followed by the administration of the chemotherapeutic agent and/or radiation; and in other situations the chemotherapeutic agent and/or radiation may be administered first followed by the administration of the HSP90 inhibitor. This alternate administration may be repeated during a single treatment protocol. The determination of the order of administration, and the number of repetitions of administration of each therapeutic agent during a treatment protocol, is well within the knowledge of the skilled physician after evaluation of the disease being treated and the condition of the patient. For example, the chemotherapeutic agent and/or radiation may be administered first, especially if it is a cytotoxic agent, and then the treatment continued with the administration of the HSP90 inhibitor followed, where determined advantageous, by the administration of the chemotherapeutic agent and/or radiation, and so on until the treatment protocol is complete.

[0386] Thus, in accordance with experience and knowledge, the practicing physician can modify each protocol for the administration of a component (therapeutic agent—i.e., HSP90 inhibitor, chemotherapeutic agent or radiation) of the treatment according to the individual patient's needs, as the treatment proceeds.

[0387] The attending clinician, in judging whether treatment is effective at the dosage administered, will consider the general well-being of the patient as well as more definite signs such as relief of disease-related symptoms, inhibition of tumor growth, actual shrinkage of the tumor, or inhibition of metastasis. Size of the tumor can be measured by standard methods such as radiological studies, e.g., CAT or MRI scan, and successive measurements can be used to judge whether or not growth of the tumor has been retarded or even reversed. Relief of disease-related symptoms such as pain, and improvement in overall condition can also be used to help judge effectiveness of treatment.

### EXAMPLES

[0388] The following examples are illustrative only, and are not intended to be limiting of the invention.

### Example 1

### Cytotoxic Activity of 17AAG on K562 Versus a Normal Cell Type

[0389] Grosveld et al., Mol Cell Biol 6(2):607-16 (1986) showed that the chronic myelocytic cell line K562 produces a chimeric bcr/c-abl transcript, making it a suitable model system to demonstrate the methods of the invention. The cell line is widely available, e.g., from American Type Culture Collection (“ATCC”; Manassas, Va., USA; cat# CCL-243) and can be propogated in a variety of media, e.g., ATCC's Iscove's modified Dulbecco's medium with 4 mM L-glutamine adjusted to contain 1.5 g/L sodium bicarbonate, 90%; fetal bovine serum, 10%; 37C.

[0390] Experimental

[0391] To K562 cells (suspension grown in DMEM media supplemented w/10% Fetal Bovine Serum (FBS) and 1 mM HEPES; subcultured biweekly at 100K cells/ml) in a 96 well plate (0.1 ml medium; 2000 cells per well) were added various concentrations of 17-AAG (CF7) and the effects measured over a period of 3-6 days using an MTS assay protocol similar to that offered by Promega Corp (Madison, Wis., US; cat# G5421).

[0392] The MTS assay is a colorimetric assay for determining the number of viable cells in proliferation, cytotoxicity or chemosensitivity assays. The CellTiter 96® AQueous Assay is composed of solutions of tetrazolium compound (3-(4,5-dimethylthiazol-2-yl)-5-(3-carboxymethoxyphenyl)-2-(4-sulfophenyl)-2H-tetrazolium, inner salt; MTS) and an electron coupling reagent (phenazine methosulfate) PMS. MTS is bioreduced by cells into a formazan that is soluble in tissue culture medium. Barltrop et al. (1991) Bioorg. & Med. Chem. Lett. 1, 611. The absorbance of the formazan at 490 nm can be measured directly from 96 well assay plates without additional processing. Cory et al. (1991) Cancer Commun. 3, 207; Riss, T. L. and Moravec, R. A. (1992) Mol. Biol. Cell 3 (Suppl.), 184a. The conversion of MTS into the aqueous soluble formazan is accomplished by dehydrogenase enzymes found in metabolically active cells. The quantity of formazan product as measured by the amount of 490 nm absorbance is directly proportional to the number of living cells in culture.

[0393] Using the MTS assay, cytotoxicity (defined as “growth inhibition” and not necessarily versus renal proximal tubular endothelial cells (normal cells) was determined as shown in the following Tables. “Sem” refers to standard error of the mean, which is calculated as the standard deviation divided by the square root of the sample size; the numbers reflect triplicate replicates. Dilutions of the compounds were prepared in DMSO and straight DMSO was used as a control corresponding to 100% metabolic activity.

Metabolic Activity

| Conc (uM) | K562 | sem1 | RPTEC | sem1 |
|---|---|---|---|---|
| 10.0000 | 7.89 | 0.56 | 20.10 | 2.64 |
| 3.0000 | 8.12 | 1.02 | 22.01 | 2.49 |
| 1.0000 | 9.51 | 0.59 | 34.01 | 0.19 |
| 0.3000 | 14.40 | 1.53 | 58.03 | 5.09 |
| 0.1000 | 44.06 | 2.76 | 86.46 | 1.51 |
| 0.0300 | 80.12 | 2.29 | 86.40 | 5.96 |
| 0.0100 | 85.94 | 0.06 | 91.81 | 8.22 |
| 0.0030 | 83.00 | 2.25 | 92.73 | 4.79 |
| 0.0010 | 83.81 | 0.73 | 92.26 | 2.97 |
| 0.0003 | 88.00 | 0.40 | 98.69 | 7.16 |

[image]

As demonstrated, the fusion protein cancer line K562 is more sensive to the HSP90 inhibitor than is the normal cell line, RPTEC. It is expected that this will hold true for a variety of tumor cell lines versus a variety of normal cell lines.

[0395] In addition to the effects of 17-AAG on K562 versus RPTEC, the effects of a number of other putative HSP90 inhibitors and control compounds were tested side-by-side per the following Table, where “NEC” refers to no effective concentration.

| Compound | RPTEC IC₅₀ (nM) | K562 IC₅₀ (nM) |
|---|---|---|
| CF7 | 400 | 70 |
| DMSO | NEC | NEC |
| 208 | 1000 | 50 |
| 237 | 4000 | 100 |
| 483 | 1000 | 70 |
| 481 | 4000 | 400 |

[0396] In the table, compound CF7 is well known 17-AAG and compounds 207, 208, 237, 483, and 481 have the following formulas.

| Compound # | Formula |
|---|---|
| 208 | [chemical structure] |
| | a water soluble dimer |
| 237 | [chemical structure] |
| | a water soluble dimer |
| 207 | [chemical structure] |
| | a water soluble dimer |
| 483 | [chemical structure] |
| | a water soluble dimer |
| 481 | [chemical structure] |
| | a water soluble prodrug |

A separate study using the well known compound, radicicol, yielded results approximating those obtained for compound 237. Preparation of compounds 207, 208, 237, 483, and 481 is described in the following examples.

### Example 2

### Preparation of Compound #208

[0397] 3,3′-diamino-N-methyldipropylamine (1.32 g, 9.1 mmol) was added dropwise to a solution of Geldanamycin (10 g, 17.83 mmol) in DMSO (200 ml) in a flame-dried flask under N2 and stirred at room temperature. The reaction mixture was diluted with water after 12 hours. A precipitate was formed and filtered to give the crude product. The crude product was chromatographed by silica chromatography (5% CH3OH/CH2Cl2) to afford the desired dimer as a purple solid (8.92 g, 7.2 mmol). Yield: 81%; mp 153° C. (dec.); 1H NMR (CDCl3) □ 0.95 (d, J=7 Hz, 6H, 2CH3), 1.0 (d, J=7 Hz, 6H, 2CH3), 1.69 (m, 4H, 2 CH2), 1.74 (m, 4H, 2CH2), 1.76 (s, 6H, 2 CH3), 1.83 (m, 2H, 2CH), 2.0 (s, 6H, 2CH3), 2.3 (s, 3H, N—CH3), 2.36(dd, J=14 Hz, 2H, 2CH), 2.5 (m, 4H, 2CH2), 2.63 (d, 2H, 2CH), 2.75(m, 2H, 2CH), 3.25(s, 6H, 20CH3), 3.35(s, 6H, 20CH3), 3.4 (m, 2H, 2CH), 3.50 (m, 4H, 2CH2), 3.68(m, 2H, 2CH), 4.2(Bs, 2H, OH), 4.3(d, J=10 Hz, 2H, 2CH), 4.8(Bs, 4H, 2NH2), 5.19(s, 2H, 2CH), 5.82(t, J=15 Hz, 2H, 2CH═), 5.89(d, J=10 Hz, 2H, 2CH═), 6.59(t, J=15 Hz, 2H, 2CH═), 6.92 (d, J=10 Hz, 2H, 2CH═), 7.13 (t, 2H, 2NH), 7.24(s, 2H, 2CH═), 9.21(s, 2H, 2NH); MS (m/z)1203 (M+H).

[0398] The corresponding HCl salt was prepared by the following method: an HCl solution in EtOH (5 ml, 0.123N) was added to a solution of compound #208 (1 gm as prepared above) in THF (15 ml) and EtOH (50 ml) at room temperature. The reaction mixture was stirred for 10 min. The salt was precipitated, filtered and washed with large amount of EtOH and dried in vacuo.

### Example 3

### Preparation of Compound #207

[0399] Compound #207 was prepared by the same method described in example 2 except that 1,4-bis (3-aminopropyl) piperazine was used instead of 3,3′-diamino-N-methyldipropylamine. The pure purple product was obtained after column chromatography (silica gel); yield: 90%; mp 162° C.; 1H NMR (CDCl3) □ 0.97 (d, J=6.6 Hz, 6H, 2CH3), 1.0 (d, J=6.6 Hz, 6H, 2CH3), 1.73 (m, 4H, 2 CH2), 1.78 (m, 4H, 2CH2), 1.80 (s, 6H, 2 CH3), 1.85 (m, 2H, 2CH), 2.0 (s, 6H, 2CH3), 2.4 (dd, J=11 Hz, 2H, 2CH), 2.55 (m, 8H, 4CH2), 2.67 (d, J=15 Hz, 2H, 2CH), 2.63 (t, J=10 HZ, 2H, 2CH), 2.78(t, J=6.5 Hz, 4H, 2CH2), 3.26(s, 6H, 20CH3), 3.38(s, 6H, 20CH3), 3.4 (m, 2H, 2CH), 3.60 (m, 4H, 2CH2), 3.75(m, 2H, 2CH), 4.6(d, J=10 Hz, 2H, 2CH), 4.65 (Bs, 2H, 20H), 4.8(Bs, 4H, 2NH2), 5.19(s, 2H, CH), 5.83(t, J=15 Hz, 2H, 2CH═), 5.89(d, J=10 Hz, 2H, 2CH═), 6.58(t, J=15 Hz, 2H, 2CH═), 6.94 (d, J=10 Hz, 2H, 2CH═), 7.24(s, 2H, 2CH═), 7.60 (m, 2H, 2NH), 9.20(s, 2H, 2NH); MS (m/z) 1258 (M+H); The corresponding HCl salt was prepared by the same procedure as described in example 1.

### Example 4

### Preparation of Compound #237

[0400] Compound #237 was prepared by the same method described in example 2 except that 3,3′-diamino-dipropylamine was used instead of 3,3′-diamino-N-methyldipropylamine. The pure purple product was obtained after flash chromatography (silica gel); yield: 93%; mp 165° C.; 1H NMR (CDCl3) □ 0.97 (d, J=6.6 Hz, 6H, 2CH3), 1.0 (d, J=6.6 Hz, 6H, 2CH3), 1.72 (m, 4H, 2 CH2), 1.78 (m, 4H, 2CH2), 1.80 (s, 6H, 2 CH3), 1.85 (m, 2H, 2CH), 2.0 (s, 6H, 2CH3), 2.4 (dd, J=11 Hz, 2H, 2CH), 2.67 (d, J=15 Hz, 2H, 2CH), 2.63 (t, J=10 HZ, 2H, 2CH), 2.78(t, J=6.5 Hz, 4H, 2CH2), 3.26(s, 6H, 20CH3),3.38(s, 6H, 20CH3),3.4 (m, 2H, 2CH), 3.60 (m, 4H, 2CH2), 3.75(m, 2H, 2CH), 4.6(d, J=10 Hz, 2H, 2CH), 4.65 (Bs, 2H, 20H), 4.8(Bs, 4H, 2NH2), 5.19(s, 2H, 2CH), 5.83(t, J=15 Hz, 2H, 2CH═), 5.89(d, J=10 Hz, 2H, 2CH═), 6.58(t, J=15 Hz, 2H, 2CH═), 6.94 (d, J=10 Hz, 2H, 2CH═), 7.17 (m, 2H, 2NH), 7.24(s, 2H, 2CH═), 9.20(s, 2H, 2NH); MS (m/z)1189 (M+H); The corresponding HCl salt was prepared by the same procedure as described in example 1.

### Example 5

### Preparation of Compound #483

[0401] Compound #483 was prepared by the same method described in example 2 except that 2,2′-diamino-N-methyldiethyllamine was used instead of 3,3′-diamino-N-methyldipropylamine. The pure purple product was obtained after flash chromatography; yield: 90%; mp 167-169° C.; 1H NMR (CDCl3) □ 0.95 (d, J=7 Hz, 6H, 2CH3), 1.00 (d, J=7 Hz, 6H, 2CH3), 1.85 (m, 4H, 2CH2), 1.75 (s, 6H, 2 CH3),1.80 (m, 2H, 2CH), 2.0 (s, 6H, 2CH3), 2.30 (s, 3H, N—CH3), 2.30 (dd, J=14 Hz, 2H, 2CH), 2.5 (m, 4H, 2CH2),2.63 (d, 2H, 2CH), 2.75(m, 2H, 2CH), 3.25(s, 6H, 20CH3), 3.35(s, 6H, 20CH3), 3.4 (m, 2H, 2CH), 3.50 (m, 4H, 2CH2), 3.68(m, 2H, 2CH), 4.2(Bs, 2H, OH), 4.30 (d, J=10 Hz, 2H, 2CH), 4.8(Bs, 4H, 2NH2), 5.19 (s, 2H, 2CH), 5.82 (t, J=15 Hz, 2H, 2CH═), 5.90 (d, J=10 Hz, 2H, 2CH═), 6.59(t, J=15 Hz, 2H, 2CH═), 6.92 (d, J=10 Hz, 2H, 2CH═), 7.13 (t, 2H, 2NH), 7.24 (s, 2H, 2CH═), 9.20 (s, 2H, 2NH); MS (m/z)1175 (M+H);); The corresponding HCl salt was prepared by the same procedure as described in example 1.

### Example 6

### Preparation of Compound #481

[0402] To 200 mg (0.357 mmol) of geldanamycin in 8 ml of dry THF in a flame-dried flask was added 91.6 mg (0.714 mmol) of N-propyl-1,4-diamino-2-butene drop-wise under nitrogen. The reaction mixture was stirred at room temperature for 4 h at which time TLC analysis indicated the reaction was complete. The solvent was removed by rotary evaporation and the crude material was chromatographed (5% CH3OH/CH2Cl2 to 15% CH3OH/CH2Cl2) to afford the desired compound as a purple solid (150 mg, 0.228 mmol); yield: 64%; mp 131° C.; 1H NMR (CDCl3) □ 0.97 (m, 9H, 3CH3), 1.52 (m, 2H, CH2), 1.72 (m, 3H, CH+CH2), 1.80 (s, 3H, CH3), 2.0 (s, 3H, CH3), 2.38 (dd, J=11 Hz, 1H, CH), 2.72 (m, 4H, 2CH, CH2), 3.26(s, 3H, OCH3), 3.38(s, 3H, OCH3), 3.46 (m, H, CH), 3.6 (m, H, CH), 4.18(m, 4H, 2CH2), 4.34(d, J=10 Hz, 1H, CH), 4.8(Bs, 2H, NH2), 5.19(s, 1H, CH), 5.88(m,4H, 4CH═), 6.38 (m, 1H, NH), 6.61(t, J=15 Hz, 1H, CH═), 6.94 (d, J=10 Hz, 1H, CH═),7.30(s, H, CH═), 9.16(s, H, NH); MS (m/z)658 (M+H). The corresponding HCl salt was prepared by the same procedure as described in example 1.

[0403] Various patents, publications, and formulations are within the levels of ordinary skill in the art to which the invention pertains. All documents including the sequence listing cited in this disclosure are incorporated by reference to the same extent as if each reference had been incorporated by reference in its entirety individually, although none is admitted to be prior art.

[0404] One skilled in the art would readily appreciate that the present invention is well adapted to carry out the objects and obtain the ends and advantages mentioned, as well as those inherent therein. The methods and compositions described herein as presently representative of preferred embodiments are exemplary and are not intended as limitations on the scope of the invention. Changes therein and other uses will occur to those skilled in the art, are encompassed within the spirit of the invention, and are defined by the scope of the claims.

[0405] It will be readily apparent to one skilled in the art that varying substitutions and modifications may be made to the invention disclosed herein without departing from the scope and spirit of the invention. Thus, such additional embodiments are within the scope of the present invention and the following claims.

[0406] The invention illustratively described herein suitably may be practiced in the absence of any element or elements, limitation or limitations which is not specifically disclosed herein. Thus, for example, in each instance herein any of the terms “comprising,” “consisting essentially of” and “consisting of” may be replaced with either of the other two terms. The terms and expressions which have been employed are used as terms of description and not of limitation, and there is no intention that in the use of such terms and expressions of excluding any equivalents of the features shown and described or portions thereof, but it is recognized that various modifications are possible within the scope of the invention claimed. Thus, it should be understood that although the present invention has been specifically disclosed by preferred embodiments, optional features, modification and variation of the concepts herein disclosed may be resorted to by those skilled in the art, and that such modifications and variations are considered to be within the scope of this invention as defined by the description and the appended claims.

[0407] In addition, where features or aspects of the invention are described in terms of Markush groups or other grouping of alternatives, those skilled in the art will recognize that the invention is also thereby described in terms of any individual member or subgroup of members of the Markush group or other group, and exclusions of individual members as appropriate.

The application's sequence listing, which the Patent Office published only in electronic form, follows.

SEQUENCE LISTING (330 sequences)

SEQ ID NO: 1 - protein, 46 aa, Homo sapiens
IPLTINKEDDESPGLYGFLNVIVHSATGFKQSSSEKLRVLGYNHNG

SEQ ID NO: 2 - DNA, 140 bp, Homo sapiens
attccgctgaccatcaataaggaagatgatgagtctccggggctctatgggtttctgaatgtcatcgtccactcagccactggatttaagcagagttcaagtgaaaagctccgggtcttaggctataatcacaatgggga

SEQ ID NO: 3 - DNA, 561 bp, Homo sapiens
gagcagcagaagaagtgtttcagaagcttctccctgacatccgtggagctgcagatgctgaccaactcgtgtgtgaaactccagactgtccacagcattccgctgaccatcaataaggaagatgatgagtctccggggctctatgggtttctgaatgtcatcgtccactcagccactggatttaagcagagttcaagaagaagccatacggtgaaccaggtgatgctgaggttatctggatccaggccatgcagatgaagccatatttacctttgtgatattggggctgatcttggagctgtctggatctgaccagtctccaggttgaaaactcttgcaactttcgtttttggatagtgctcacctcgtatctgtactcgtaactgctatttctaggcgaattgtcccctttctcctccctcttccctcatctccctctctcctctgcctggctgacaccaggaaggaggagttttcttttatttagataaaaaaaagttgagaggaggcagctccagaaatgtgggatactcagcactggagacatttgggctggaattc

SEQ ID NO: 4 - protein, 284 aa, Homo sapiens
TDLLLCTKLKKQSGGKTQQYDCKWYIPVTDLSFQMVDELEAVPNIPLVPDEELNALKIKISQIKSDIQREKRANKGSKATERLKKKLSEQESLLLLMSPSMAFRVHSRNGKSYTFLISSDYERAEWRENIREQQKKCFRSFSLASVELQMLTNSCVKLQTVHSIPLTINKEDDESPGLYGFLNVIVHSATGFKQSSKLQRPVASDFEPQGLSEAARWNSKENLLAGPSENDPNLFVALYDFVASGDNTLSITKGEKLRVLGYNHNGEWCEAQTKNGQGWVPSNY

SEQ ID NO: 5 - DNA, 854 bp, Homo sapiens
accgacctgcttctctgcaccaagctcaagaagcagagcggaggcaaaacgcagcagtatgactgcaaatggtacattccggtcacggatctcagcttccagatggtggatgaactggaggcagtgcccaacatccccttggtgcccgatgaggagctgaacgctttgaagatcaagatctcccagatcaagagtgacatccagagagagaagagggcgaacaagggcagcaaggctacggagaggctgaagaagaagctgtcggagcaggagtcactgctgctgcttatgtctcccagcatggccttcagggtgcacagccgcaacggcaagagttacacgttcctgatctcctctgactatgagcgtgcagagtggagggagaacatccgggagcagcagaagaagtgtttcagaagcttctccctggcatccgtggagctgcagatgctgaccaactcgtgtgtgaaactccagactgtccacagcattccgctgaccatcaataaggaagatgatgagtctccggggctctatgggtttctgaatgtcatcgtccactcagccactggatttaagcagagttcaaaacttcagcggccagtagcatctgactttgagcctcagggtctgagtgaagccgctcgttggaactccaaggaaaaccttctcgctggacccagtgaaaatgaccccaaccttttcgttgcactgtatgattttgtggccagtggagataacactctaagcataactaaaggtgaaaagctccgggtcttaggctataatcacaatggggaatggtgtgaagcccaaaccaaaaatggccaaggctgggtcccaagcaactacat

SEQ ID NO: 6 - DNA, 468 bp, Homo sapiens
gtccacagcattccgctgaccatcaataaggaagatgatgagtctccggggctctatgggtttctgaatgtcatcgtccactcagccactggatttaagcagagttcaaaagcccttcagcggccagtagcatctgactttgagcctcagggtctgagtgaagccgctcgttggaactccaaggaaaaccttctcgctggacccagtgaaaatgaccccaaccttttcgttgcactgtatgattttgtggccagtggagataacactctaagcataactaaaggtgaaaagctccgggtcttaggctataatcacaatggggaatggtgtgaagcccaaaccaaaaatggccaaggctgggtcccaagcaactacatcacgccagtcaacagtctggagaaacactcctggtaccatgggcctgtgtcccgcaatgccgctgagtatctgctgagcagcgggatcaat

SEQ ID NO: 7 - protein, 225 aa, Homo sapiens
ISQIKSDIQREKRANKGSKATERLKKKLSEQESLLLLMSPSMAFRVHSRNGKSYTFLISSDYERAEWRENIREQQKKCFRSFSLASVELQMLTNSCVKLQTVHSIPLTINKEDDESPGLYGFLNVIVHSATGFKQSSKLQRPVASDFEPQGLSEAARWNSKENLLAAPSENDPNLFVALYDFVASGDNTLSITKGEKLRVLGYNHNGEWCEAQTKIGQGWVPSNY

SEQ ID NO: 8 - DNA, 679 bp, Homo sapiens
agatctcccagatcaagagtgacatccagagagagaagagggcgaacaagggcagcaaggctacggagaggctgaagaagaagctgtcggagcaggagtcactgctgctgcttatgtctcccagcatggccttcagggtgcacagccgcaacggcaagagttacacgttcctgatctcctctgactatgagcgtgcagagtggagggagaacatccgggagcagcagaagaagtgtttcagaagcttctccctggcatccgtggagctgcagatgctgaccaactcgtgtgtgaaactccagactgtccacagcattccgctgaccatcaataaggaagatgatgagtctccggggctctatgggtttctgaatgtcatcgtccactcagccactggatttaagcagagttcaaaacttcagcggccagtagcatctgactttgagcctcagggtctgagtgaagccgctcgttggaactccaaggaaaaccttctcgctgcacccagtgaaaatgaccccaaccttttcgttgcactgtatgattttgtggccagtggagataacactctaagcataactaaaggtgaaaagctccgggtcttaggctataatcacaatggggaatggtgtgaagcccaaaccaaaattggccaaggctgggttccaagcaactacat

SEQ ID NO: 9 - protein, 332 aa, Homo sapiens
ANKGSKATERLKKKLSEQESLLLLMSPSMAFRVHSRNGKSYTFLISSDYERAEWRENIREQQKKCFRSFSLTSVELQMLTNSCVKLQTVHSIPLTINKEDDESPGLYGFLNVIVHSATGFKQSSKALQRPVASDFEPQGLSEAARWNSKENLLAGPSENDPNLFVALYDFVASGDNTLSITKGEKLRVLGYNHNGEWCEAQTKNGQGWVPSNYITPVNSLEKHSWYHGPVSRNAAEYLLSSGINGSFLVRESESSPGQRSISLRYEGRVYHYRINTASDGKLYVSSESRFNTLAELVHHHSTVADGLITTLHYPAPKRNKPTVYGVSPNYDK

SEQ ID NO: 10 - DNA, 997 bp, Homo sapiens
gcgaacaagggcagcaaagctacggagaggctgaagaagaagctgtcggagcaggagtcactgctgctgcttatgtctcccagcatggccttcagggtgcacagccgcaacggcaagagttacacgttcctgatctcctctgactatgagcgtgcagagtggagggagaacatccgggagcagcagaagaagtgtttcagaagcttctccctgacatccgtggagctgcagatgctgaccaactcgtgtgtgaaactccagactgtccacagcattccgctgaccatcaataaggaagatgatgagtctccggggctctatgggtttctgaatgtcatcgtccactcagccactggatttaagcagagttcaaaagcccttcagcggccagtagcatctgactttgagcctcagggtctgagtgaagccgctcgttggaactccaaggaaaaccttctcgctggacccagtgaaaatgaccccaaccttttcgttgcactgtatgattttgtggccagtggagataacactctaagcataactaaaggtgaaaagctccgggtcttaggctataatcacaatggggaatggtgtgaagcccaaaccaaaaatggccaaggctgggtcccaagcaactacatcacgccagtcaacagtctggagaaacactcctggtaccatgggcctgtgtcccgcaatgccgctgagtatctgctgagcagcgggatcaatggcagcttcttggtgcgtgagagtgagagcagtcctggccagaggtccatctcgctgagatacgaagggagggtgtaccattacaggatcaacactgcttctgatggcaagctctacgtctcctccgagagccgcttcaacaccctggccgagttggttcatcatcattcaacggtggccgacgggctcatcaccacgctccattatccagccccaaagcgcaacaagcccactgtctatggtgtgtcccctaactacgacaagt

SEQ ID NO: 11 - protein, 101 aa, Homo sapiens
REQQKKCFRSFSLTSVELQMLTNSCVKLQTVHSIPLTINKEHDESPGLYGFLNVIVHSATGFKQSSNLYCTLEVDSFGYFVNKAKTRVYRDTAEPNLLAGP

SEQ ID NO: 12 - DNA, 305 bp, Homo sapiens
ccgggagcagcagaagaagtgtttcagaagcttctccctgacatccgtggagctgcagatgctgaccaactcgtgtgtgaaactccagactgtccacagcattccgctgaccatcaataaggaacatgatgagtctccggggctctatgggtttctgaatgtcatcgtccactcagccactggatttaagcagagttcaaatctgtactgcaccctggaggtggattcctttgggtattttgtgaataaagcaaagacgcgcgtctacagggacacagctgagccaaaccttctcgctggaccca

SEQ ID NO: 13 - DNA, 250 bp, Homo sapiens
tggagctgcagatgctgaccaactcgtgtgtgaaactccagactgtccacagcattccgctgaccatcaataaggaagatgatgagtctccggggctctatgggtttctgaacactcagccactggatttaagcagagttcaaatctgtactgcaccctggaggtggattcctttgggtattttgtgaataaagcaaagacgcgcgtctacagggacacagctgagccaaaccttctcgctggacccaat

SEQ ID NO: 14 - DNA, 63 bp, Homo sapiens
gatggcgagggcgccttccatggagacgcaggtgagttcctcacgccacgtgcgtgggcacac

SEQ ID NO: 15 - protein, 21 aa, Homo sapiens
DGEGAFHGDADGSFGTPPGYG

SEQ ID NO: 16 - DNA, 63 bp, Homo sapiens
gatggcgagggcgccttccatggagacgcagatggctcgttcggaacaccacctggatacggc

SEQ ID NO: 17 - protein, 21 aa, Homo sapiens
DGEGAFHGDAEALQRPVASDF

SEQ ID NO: 18 - DNA, 63 bp, Homo sapiens
gatggcgagggcgccttccatggagacgcagaagcccttcagcggccagtagcatctgacttt

SEQ ID NO: 19 - protein, 140 aa, Homo sapiens
LLYKPVDRVTRSTLVLHDLLKHTPASHPDHPLLQDALRISQNFLSSINEEITPRRQSMTVKKGEGEDRMKASSTRKRLLLMEEALQRPVASDFEPQGLSEAARWNSKENLLAGPSENDPNLFVALYDFVASGDNTLSITK

SEQ ID NO: 20 - DNA, 423 bp, Homo sapiens
ctctgctctacaagcctgtggaccgtgtgacgaggagcacgctggtcctccatgacttgctgaagcacactcctgccagccaccctgaccaccccttgctgcaggacgccctccgcatctcacagaacttcctgtccagcatcaatgaggagatcacaccccgacggcagtccatgacggtgaagaagggagagggagaagacaggatgaaagcttcatcaacgaggaagagattactccttatggaagaagcccttcagcggccagtagcatctgactttgagcctcagggtctgagtgaagccgctcgttggaactccaaggaaaaccttctcgctggacccagtgaaaatgaccccaaccttttcgttgcactgtatgattttgtggccagtggagataacactctaagcataactaaag

SEQ ID NO: 21 - protein, 307 aa, Homo sapiens
ANKGSKATERLKKKLSEQESLLLLMSPSMAFRVHSRNGKSYTFLISSDYERAEWRENIREQQKKCFRSFSLTSVELQMLTNSCVKLQTVHSIPLTINKEEALQRPVASDFEPQGLSEAARWNSKENLLAGPSENDPNLFVALYDFVASGDNTLSITKGEKLRVLGYNHNGEWCEAQTKNGQGWVPSNYITPVNSLEKHSWYHGPVSRNAAEYLLSSGINGSFLVRESESSPGQRSISLRYEGRVYHYRINTASDGKLYVSSESRFNTLAELVHHHSTVADGLITTLHYPAPKRNKPTVYGVSPNYDK

SEQ ID NO: 22 - DNA, 922 bp, Homo sapiens
gcgaacaagggcagcaaggctacggagaggctgaagaagaagctgtcggagcaggagtcactgctgctgcttatgtctcccagcatggccttcagggtgcacagccgcaacggcaagagttacacgttcctgatctcctctgactatgagcgtgcagagtggagggagaacatccgggagcagcagaagaagtgtttcagaagcttctccctgacatccgtggagctgcagatgctgaccaactcgtgtgtgaaactccagactgtccacagcattccgctgaccatcaataaggaagaagcccttcagcggccagtagcatctgactttgagcctcagggtctgagtgaagccgctcgttggaactccaaggaaaaccttctcgctggacccagtgaaaatgaccccaaccttttcgttgcactgtatgattttgtggccagtggagataacactctaagcataactaaaggtgaaaagctccgggtcttaggctataatcacaatggggaatggtgtgaagcccaaaccaaaaatggccaaggctgggtcccaagcaactacatcacgccagtcaacagtctggagaaacactcctggtaccatgggcctgtgtcccgcaatgccgctgagtatctgctgagcagcgggatcaatggcagcttcttggtgcgtgagagtgagagcagtcctggccagaggtccatctcgctgagatacgaagggagggtgtaccattacaggatcaacactgcttctgatggcaagctctacgtctcctccgagagccgcttcaacaccctggccgagttggttcatcatcattcaacggtggccgacgggctcatcaccacgctccattatccagccccaaagcgcaacaagcccactgtctatggtgtgtcccccaactacgacaagt

SEQ ID NO: 23 - protein, 359 aa, Homo sapiens
YQPYQSIYVGGMMEGEGKGPLLRSQSTSEQEKRLTWPRRSYSPRSFEDCGGGYTPDCSSNENLTSSEEDFSSGQSSRVSPSPTTYRMFRDKSRSPSQNSQQSFDSSSPPTPQCHKRHRHCPVVVSEATIVGVRKTGQIWPNDGEGAFHGDAEALQRPVASDFEPQGLSEAARWNSKENLLAGPSENDPNLFVALYDFVASGDNTLSITKGEKLRVLGYNHNGEWCEAQTKNGQGWVPSNYITPVNSLEKHSWYHGPVSRNAAEYLLSSGINGSFLVRESESSPGQRSISLRYEGRVYHYRINTASDGKLYVSSESRFNTLAELVHHHSTVADGLITTLHYPAPKRNKPTVYGVSPNYDK

SEQ ID NO: 24 - DNA, 1079 bp, Homo sapiens
gtaccagccctaccagagcatctacgtcgggggcatgatggaaggggagggcaagggcccgctcctgcgcagccagagcacctctgagcaggagaagcgccttacctggccccgcaggtcctactccccccggagttttgaggattgcggaggcggctataccccggactgcagctccaatgagaacctcacctccagcgaggaggacttctcctctggccagtccagccgcgtgtccccaagccccaccacctaccgcatgttccgggacaaaagccgctctccctcgcagaactcgcaacagtccttcgacagcagcagtccccccacgccgcagtgccataagcggcaccggcactgcccggttgtcgtgtccgaggccaccatcgtgggcgtccgcaagaccgggcagatctggcccaacgatggcgagggcgccttccatggagacgcagaagcccttcagcggccagtagcatctgactttgagcctcagggtctgagtgaagccgctcgttggaactccaaggaaaaccttctcgctggacccagtgaaaatgaccccaaccttttcgttgcactgtatgattttgtggccagtggagataacactctaagcataactaaaggtgaaaagctccgggtcttaggctataatcacaatggggaatggtgtgaagcccaaaccaaaaatggccaaggctgggtcccaagcaactacatcacgccagtcaacagtctggagaaacactcctggtaccatgggcctgtgtcccgcaatgccgctgagtatctgctgagcagcgggatcaatggcagcttcttggtgcgtgagagtgagagcagtcctggccagaggtccatctcgctgagatacgaagggagggtgtaccattacaggatcaacactgcttctgatggcaagctctacgtctcctccgagagccgcttcaacaccctggccgagttggttcatcatcattcaacggtggccgacgggctcatcaccacgctccattatccagccccaaagcgcaacaagcccactgtctatggtgtgtcccccaactacgacaagt

SEQ ID NO: 25 - protein, 34 aa, Homo sapiens
VGVRKTGQIWPNDGEGAFHGDAGKSPGLRLNHNG

SEQ ID NO: 26 - DNA, 106 bp, Homo sapiens
tcgtgggcgtccgcaagaccgggcagatctggcccaacgatggcgagggcgccttccatggagacgcaggtaaaagcccgggtcttaggctaaatcacaatgggga

SEQ ID NO: 27 - protein, 114 aa, Homo sapiens
MAECPTLGEAVTDHPDRLWAWEKFVYLDEKQHAWLPLTIEIKDRLQLRVLLRREDVVLGRPMTPTQIGPSLLPIMWQLYPDGRYRSSDSSFWRLVYHIKIDGVEDMLLELLPDD

SEQ ID NO: 28 - DNA, 1324 bp, Homo sapiens
cttgagaggctctggctcttgcttcttaggcggcccgaggacgccatggccgagtgcccgacactcggggaggcagtcaccgaccacccggaccgcctgtgggcctgggagaagttcgtgtatttggacgagaagcagcacgcctggctgcccttaaccatcgagataaaggataggttacagttacgggtgctcttgcgtcgggaagacgtcgtcctggggaggcctatgacccccacccagataggcccaagcctgctgcctatcatgtggcagctctaccctgatggacgataccgatcctcagactccagtttctggcgcttagtgtaccacatcaagattgacggcgtggaggacatgcttctcgagctgctgccagatgactgatgtatggtcttggcagcacctgtctcctttcaccccagggcctgagcctggccagcctacaatggggatgttgtgtttctgttcaccttcgtttactatgcctgtgtcttctccaccacgctggggtctgggaggaatggacagacagaggatgagctctacccagggcctgcaggacctgcctgtagcccactctgctcgccttagcactaccactcctgccaaggaggattccatttggcagagcttcttccaggtgcccagctatacctgtgcctcggcttttctcagctggatgatggtcttcagcctctttctgtcccttctgtccctcacagcactagtatttcatgttgcacacccactcagctccgtgaacttgtgagaacacagccgattcacctgagcaggacctctgaaaccctggaccagtggtctcacatggtgctacgcctgcatgtaaacacgcctgcaaacgctgcctgccggtaaacacgcctgcaaacgctgcctgcccgtaaacacgcctgcaaacgctgcctgcccacacaggttcacgtgcagctcaaggaaaggcctgaaaggagcccttatctgtgctcaggactcagaagcctctgggtcagtggtccacatcccgggacgcagcaggaggccaggccggcgagccctgtggatgagccctcagaacccttggcttgcccacgtggaaaagggatagaggttgggtttcccccctttatagatggtcacgcacctgggtgttacaaagttgtatgtggcatgaatactttttgtaatgattgattaaatgcaagatagtttatctaacttcgtgcgcaatcagcttctatccttgacttagattctggtggagagaagtgagaataggcagcccccaaataaaaaatattcatggaaaaaaaaaaaaaaa

SEQ ID NO: 29 - protein, 114 aa, Homo sapiens; identical to SEQ ID NO: 27

SEQ ID NO: 30 - DNA, 1324 bp, Homo sapiens; identical to SEQ ID NO: 28

SEQ ID NO: 31 - DNA, 560 bp, Homo sapiens
gtcgactgtgagttcccagcagaggcccagagtcccggtccggcagccgagggaagcgggggggtcttccagaagaagaaagggccaaggtcaccccggtgcctctccagcagcagcagagggcggcggtcggtgtcgctgctggccggggcctcgaggaaggcgcgggccagctggggccgggtctgcgttcccaggagctgccaccgttccagggagcaagtcaggccgggacgttagcgcctgcgcgggaccctcacttgccaccaaggaccccacaaaccccgccccatccttagcgcctgcgcgggaccctcacttgccaccaagacccccacaaaccccgccccatcctgccttacgccccgccccaaggtcgttctcccgacccggggtcccgccccaagaccgtcctcccgccccgccgcttggtggcggccgcatgctgcccggatataaagggtcggccccacatcccagggaccagcgagcggccttgagaggctctggctcttgcttcttaggcggcccgaggacgccatggccgagtgcccgacact

SEQ ID NO: 32 - protein, 125 aa, Homo sapiens
FAGVQCEVQLVESGGGLVQPGGSLRLSCAASGFTFSSYWMHWVRQAPGKGLVWVSRINSDGSSTSYADSVKGRFTISRDNAKNTLYLQMNSLRAEDTAVYYCARDPTGGSYIPTFGRGTSLIVHP

SEQ ID NO: 33 - DNA, 375 bp, Homo sapiens
tttgcaggtgtccagtgtgaggtgcagctggtggagtccgggggaggcttagttcagcctggggggtccctgagactctcctgtgcagcctctggattcaccttcagtagctactggatgcactgggtccgccaagctccagggaaggggctggtgtgggtctcacgtattaatagtgatgggagtagcacaagctacgcggactccgtgaagggccgattcaccatctccagagacaacgccaagaacacgctgtatctgcaaatgaacagtctgagagccgaggacacggctgtgtattactgtgcaagagatccaacaggaggaagctacatacctacatttggaagaggaaccagccttattgttcatccg

SEQ ID NO: 34 - protein, 125 aa, Homo sapiens
TGVLSQVQLQESGPGLVKPSETLSLTCTVSGYSISSGYYWGWIRQPPGKGLEWIGSIYHSGSTYYNPSLKSRVTISVDTSKNQFSLKLSSVTAADTAVYYCARVRRRYSSASKIIFGSGTRLSIR

SEQ ID NO: 35 - DNA, 377 bp, Homo sapiens
tcacaggggtcctgtcccaggtgcagctgcaggagtcgggcccaggactggtgaagccttcggagaccctgtccctcacctgcactgtctctggttactccatcagcagtggttactactggggctggatccggcagcccccagggaaggggctggagtggattgggagtatctatcatagtgggagcacctactacaacccgtccctcaagagtcgagtcaccatatcagtagacacgtccaagaaccagttctccctgaagctgagctctgtgaccgccgcagacacggccgtgtattactgtgcgagagtccgtcggaggtacagcagtgcttccaagataatctttggatcagggaccagactcagcatccgg

SEQ ID NO: 36 - protein, 140 aa, Homo sapiens
MKHLWFFLLLVAAPRWVLSQVQLQESGPGLVKPSETLSLTCTVSGYSISSGYYWGWIRQPPGKGLEWIGSIYHSGSTYYNPSLKSRVTISVDTSKNQFSLKLSSVTAADTAVYYCARVRRRYSSASKIIFGSGTRLSIRP

SEQ ID NO: 37 - DNA, 675 bp, Homo sapiens
ccacccacatgcaaatcctcacttaggcgcccacaggaagccacaacacatttccttaaattcaggtccaactcataagggaaatgctttctgagagtcatggacctcctgtgcaagaacatgaagcacctgtggtttttcctcctgctggtggcagctcccagatgtgagtgtctcagggatccagacgtgaagatatgggaagtgcctctgatcccagggctcaccgtgggtttttctgttcacaggggtcctgtcccaggtgcagctgcaggagtcgggcccaggactggtgaagccttcggagaccctgtccctcacctgcactgtctctggttactccatcagcagtggttactactggggctggatccggcagcccccagggaaggggctggagtggattgggagtatctatcatagtgggagcacctactacaacccgtccctcaagagtcgagtcaccatatcagtagacacgtccaagaaccagttctccctgaagctgagctctgtgaccgccgcagacacggccgtgtattactgtgcgagagtccgtcggaggtacagcagtgcttccaagataatctttggatcagggaccagactcagcatccggccaagtaagtagaatgaagcaggagagcaagggaggacggacaactatttcttctt

SEQ ID NO: 38 - protein, 158 aa, Homo sapiens
MVTGGVLSQVQLQESGPGLVKPSETLSLTCTVSGYSISSGYYWGWIRQPPGKGLEWIGSIYHSGSTYYNPSLKSRVTISVDTSKNQFSLKLSSVTAADTAVYYCARVRRRYSSASKIIFGSGTRLSIRPNIQNPDPAVYQLRDSKSSDKSVCLFTDFD

SEQ ID NO: 39 - DNA, 508 bp, Homo sapiens
tgtcctctgaaaactcgggaatttgtcactgaaatggtgacaggaggggtcctgtcccaggtgcagctgcaggagtcgggcccaggactggtgaagccttcggagaccctgtccctcacctgcactgtctctggttactccatcagcagtggttactactggggctggatccggcagcccccagggaaggggctggagtggattgggagtatctatcatagtgggagcacctactacaacccgtccctcaagagtcgagtcaccatatcagtagacacgtccaagaaccagttctccctgaagctgagctctgtgaccgccgcagacacggccgtgtattactgtgcgagagtccgtcggaggtacagcagtgcttccaagataatctttggatcagggaccagactcagcatccggccaaatatccagaaccctgaccctgccgtgtaccagctgagagactctaaatccagtgacaagtctgtctgcctattcaccgattttgatt

SEQ ID NO: 40 - protein, 162 aa, Homo sapiens
MAEALHGKRVLSQVQLQESGPGLVKPSETLSLACTVSGYSISSGYYWGWIRQPPGKGLEWIGSIYHSGSTYYNPSLKSRVTISVDTSKNQFSLKLSSVTAADTAVYYCARVRRRYSSASKIIFGSGTRLSIRPNIQNPDPAVYQLRDSKSSDKSVCLFTDFD

SEQ ID NO: 41 - DNA, 616 bp, Homo sapiens
tgtcctctgaaaactcgggaatttgtcactgaaatggtgacaggagcctacaggtggcagatgagaactctcaacacagttgtgttagaagaaggatttcctagagagaccctgactcaatgatgatacatggctgaagcattgcatggaaaacgggtcctgtcccaggtgcagctgcaggagtcgggcccaggactggtgaagccttcggagaccctgtccctcgcctgcactgtctctggttactccatcagcagtggttactactggggctggatccggcagcccccagggaaggggctggagtggattgggagtatctatcatagtgggagcacctactacaacccgtccctcaagagtcgagtcaccatatcagtagacacgtccaagaaccagttctccctgaagctgagctctgtgaccgccgcagacacggccgtgtattactgtgcgagagtccgtcggaggtacagcagtgcttccaagataatctttggatcagggaccagactcagcatccggccaaatatccagaaccctgaccctgccgtgtaccagctgagagactctaaatccagtgacaagtctgtctgcctattcaccgattttgatt

SEQ ID NO: 42 - protein, 550 aa, Homo sapiens
GYQLHGAEVNGGLPSASSFSSAPGATYGVSSHTPPVSGADSLLGSRGTTAGSSGDALGKALASIYSPDHSSNNFSSSPSTPVGSPQGLAGTSQWPRAGAPGALSPSYDGGLHGLQSKIEDHLDEAIHVLRSHAVGTAGDMHTLLPGHGALASGFTGPMSLGGRHAGLVGGSHPEDGLAGSTSLMHNHAALPSQPGTLPDLSRPPDSYSVLSIRGAQEEEPTDPQLMRLDNMLLAEGVAGPEKGGGSAAAAAAAAASGGAGSDNSVEHSDYRAKLSQIRQIYHTELEKYEQACNEFTTHVMNLLREQSRTRPISPKEIERMVSIIHRKFSSIQMQLKQSTCEAVMILRSRFLDARRKRRNFNKQATEILNEYFYSHLSNPYPSEEAKEELAKKCGITVSQVSNWFGNKRIRYKKNIGKFQEEANIYAAKTAVTATNVSAHGSQANSPSTPNSAGSSSSFNMSNSGDLFMSVQSLNGDSYQGAQVGANVQSQVDTLRHVISQTGGYSDGLAASQMYSPQGISANGGWQDATTPSSVTSPTEGPGSVHSDTSN

SEQ ID NO: 43 - DNA, 2049 bp, Homo sapiens
ggctaccagctgcatggagcagaggtgaacggagggctcccatctgcatcctccttctcctcagcccccggagccacgtacggcgtctccagccacacgccgcctgtcagcggggccgacagcctcctgggctcccgagggaccacagctggcagctccggggatgccctcggcaaagcactggcctcgatctactccccggatcactcaagcaataacttctcgtccagcccttctacccccgtgggctccccccagggcctggcaggaacgtcacagtggcctcgagcaggagcccccggtgccttatcgcccagctacgacgggggtctccacggcctgcagagtaagatagaagaccacctggacgaggccatccacgtgctccgcagccacgccgtgggcacagccggcgacatgcacacgctgctgcctggccacggggcgctggcctcaggtttcaccggccccatgtcactgggcgggcggcacgcaggcctggttggaggcagccaccccgaggacggcctcgcaggcagcaccagcctcatgcacaaccacgcggccctccccagccagccaggcaccctccctgacctgtctcggcctcccgactcctacagtgttttgagtatccgaggagcccaggaggaggaacccacagacccccagctgatgcggctggacaacatgctgttagcggaaggcgtggcggggcctgagaagggcggagggtcggcggcagcggcggcagcggcggcggcttctggaggggcaggttcagacaactcagtggagcattcagattacagagccaaactctcacagatcagacaaatctaccatacggagctggagaaatacgagcaggcctgcaacgagttcaccacccacgtgatgaatctcctgcgagagcaaagccggaccaggcccatctccccaaaggagattgagcggatggtcagcatcatccaccgcaagttcagctccatccagatgcagctcaagcagagcacgtgcgaggcggtgatgatcctgcgttcccgatttctggatgcgcggcggaagagacggaatttcaacaagcaagcgacagaaatcctgaatgaatatttctattcccatctcagcaacccttaccccagtgaggaagccaaagaggagttagccaagaagtgtggcatcacagtctcccaggtatcaaactggtttggaaataagcgaatccggtacaagaagaacataggtaaatttcaagaggaagccaatatttatgctgccaaaacagctgtcactgctaccaatgtgtcagcccatggaagccaagctaactcgccctcaactcccaactcggctggttcttccagttcttttaacatgtcaaactctggagatttgttcatgagcgtgcagtcactcaatggggattcttaccaaggggcccaggttggagccaacgtgcaatcacaggtggatacccttcgccatgttatcagccagacaggaggatacagtgatggactcgcagccagtcagatgtacagtccgcagggcatcagtgctaatggaggttggcaggatgctactaccccttcatcagtgacctcccctacagaaggccctggcagtgttcactctgatacctccaactgatctcccagcaatcgcatcccggctgaccctgtgccccagttggggcaggggcaggagggagggtttctctcccaacgctgaagcggtcagactggaggtcgaagcaatcagcaaacacaataagagtctccttctcttctcttctttgggatgctatttcagccaatctggacacttctttatactctcttcccttttttttctgggtagaagccacccttccctgcctccagctgtcagcctggttttcgtcatcttccctgcccctgtgcctctgtcctagactcccggggtccccgccctctctcatatcactgaaggatattttcaacaattgaaggaatttaaagagcaaaaaaattacaaagaaaataataaaagtgtttgtacgttttc

SEQ ID NO: 44 - protein, 574 aa, Homo sapiens [sequence omitted]

SEQ ID NO: 45 - DNA, 4410 bp, Homo sapiens
gcctgaggtgcccgccctggccccaggagaatgaaccagccgcagaggatggcgcctgtgggcacagacaaggagctcagtgacctcctggacttcagcatgatgttcccgctgcctgtcaccaacgggaagggccggcccgcctccctggccggggcgcagttcggaggttcaggtcttgaggaccggcccagctcaggctcctggggcagcggcgaccagagcagctcctcctttgaccccagccggaccttcagcgagggcacccacttcactgagtcgcacagcagcctctcttcatccacattcctgggaccgggactcggaggcaagagcggtgagcggggcgcctatgcctccttcgggagagacgcaggcgtgggcggcctgactcaggctggcttcctgtcaggcgagctggccctcaacagccccgggcccctgtccccttcgggcatgaaggggacctcccagtactacccctcctactccggcagctcccggcggagagcggcagacggcagcctagacacgcagcccaagaaggtccggaaggtcccgccgggtcttccatcctcggtgtacccacccagctcaggtgaggactacggcagggatgccaccgcctacccgtccgccaagacccccagcagcacctatcccgcccccttctacgtggcagatggcagcctgcacccctcagccgagctctggagtcccccgggccaggcgggcttcgggcccatgctgggtgggggctcatccccgctgcccctcccgcccggtagcggcccggtgggcagcagtggaagcagcagcacgtttggtggcctgcaccagcacgagcgtatgggctaccagctgcatggagcagaggtgaacggtgggctcccatctgcatcctccttctcctcagcccccggagccacgtacggcggcgtctccagccacacgccgcctgtcagcggggccgacagcctcctgggctcccgagggaccacagctggcagctccggggatgccctcggcaaagcactggcctcgatctactccccggatcactcaagcaataacttctcgtccagcccttctacccccgtgggctccccccagggcctggcaggaacgtcacagtggcctcgagcaggagcccccggtgccttatcgcccagctacgacgggggtctccacggcctgcagagtaagatagaagaccacctggacgaggccatccacgtgctccgcagccacgccgtgggcacagccggcgacatgcacacgctgctgcctggccacggggcgctggcctcaggtttcaccagtcccatgtcgctgggtgggcggcacgcaggcctggttggaggcagccaccccgaggacggcctcgcaggcagcaccagcctcatgcacaaccacgcggccctccccagccagccaggcaccctccctgacctgtctcggcctcccgactcctacagtggccagggcatctcaccgcagcttggtcccctctccacctcgatctacttgctcacccaggatgacaagtactgggcaaggcgcagaaagaacaacatggcagccaagcgctcccgcgacgcccggaggctgaaagagaaccagatcgccatccgggcctcgttcctggagaaggagaactcggccctccgccaggaggtggctgacttgaggaaggagctgggcaaatgcaagaacatacttgccaagtatgaggccaggcacgggcccctgtaggatggcatttttgcaggctggctttggaatagatggacagtttgtttcctgtctgatagcaccacacgcaaaccaacctttctgacatcagcactttaccagaggcataaacacaactgactcccattttggtgtgcatctgtgtgtgtgtgcgtgtatatgtgcttgtgctcatgtgtgtggtcagcggtatgtgcgtgtgcgtgttcctttgctcttgccattttaaggtagccctctcatcgtcttttagttccaacaaagaaaggtgccatgtctttactagactgaggagccctctcgcgggtctcccatcccctccctccttcactcctgcctcctcagctttgcttcatgttcgagcttacctactcttccaggactctctgcttggattcactaaaaagggccctggtaaaatagtggatctcagtttttaagagtacaagctcttgtttctgtttagtccgtaagttaccatgctaatgaggtgcacacaataacttagcactactccgcagctctagtcctttataagttgctttcctcttactttcagttttggtgataatcgtcttcaaattaaagtgctgtttagatttattagatcccatatttacttactgctatctactaagtttccttttaattctaccaaccccagataagtaagagtactattaatagaacacagagtgtgtttttgcactgtctgtacctaaagcaataatcctattgtacgctagagcatgctgcctgagtattactagtggacgtaggatattttccctacctaagaatttcactgtcttttaaaaaacaaaaagtaaagtaatgcatttgagcatggccagactattccctaggacaaggaagcagagggaaatgggaggtctaaggatgaggggttaatttatcagtacatgagccaaaaactgcgtcttggattagcctttgacattgatgtgttcggttttgttgttccccttccctcacaccctgcctcgcccccacttttctagttaactttttccatatccctcttgacattcaaaacagttacttaagattcagttttcccactttttggtaatatatatatttttgtgaattatactttgttgtttttaaaaagaaaatcagttgattaagttaataagttgatgttttctaaggccctttttcctagtggtgtcatttttgaatgcctcataaattaatgattctgaagcttatgtttcttattctctgtttgcttttgaacgtatgtgctcttataaagtggacttctgaaaaatgaatgtaaaagacactggtgtatctcagaaggggatggtgttgtcacaaactgtggttaatccaatcaatttaaatgtttactatagaccaaaaggagagattattaaatcgtttaatgtttatacagagtaattataggaagttcttttttgtacagtatttttcagatataaatactgacaatgtattttggaagacatatattatatatagaaaagaggagaggaaaactattccatgttttaaaattatatagcaaagatatatattcaccaatgttgtacagagaagaagtgcttgggggtttttgaagtctttaatattttaagccctatcactgacacatcagcatgttttctgctttaaattaaaattttatgacagtatcgaggcttgtgatgacgaatcctgctctaaaatacacaaggagctttcttgtttcttattaggcctcagaaagaagtcagttaacgtcacccaaaagcacaaaatggattttagtcaaatatttattggatgatacagtgttttttaggaaaagcatctgccacaaaaatgttcacttcgaaattctgagttcctggaatggcacgttgctgccagtgccccagacagttcttttctaccctgcgggcccgcacgttttatgaggttgatatcggtgctatgtgtttggtttataatttgatagatgtttgactttaaagatgattgttcttttgtttcattaagttgtaaaatgtcaagaaattctgctgttacgacaaagaaacattttacgctagattaaaatatcctttcatcaatgggattttctagtttcctgccttcagagtatctaatcctttaatgatctggtggtctcctcgtcaatccatcagcaatgcttctctcatagtgtcatagacttgggaaacccaaccagtaggatatttctacaaggtgttcattttgtcacaagctgtagataacagcaagagatgggggtgtattggaattgcaatacattgttcaggtgaataataaaatcaaaaacttttgcaatcttaagcagagataaataaaagatagcaatatgagacacaggtggacgtagagttggcctttttacaggcaaagaggcgaattgtagaattgttagatggcaatagtcattaaaaacatagaaaaatgatgtctttaagtggagaattgtggaaggattgtaacatggaccatccaaatttatggccgtatcaaatggtagctgaaaaaactatatttgagcactggtctctcttggaattagatgtttatatcaaatgagcatctcaaatgttttctgcagaaaaaaataaaaagattctaataaaaaaa

SEQ ID NO: 46 - protein, 416 aa, Homo sapiens
PNSNHVASGAGEAAIETQSSSSEEIVPSPPSPPPLPRIYKPCFVCQDKSSGYHYGVSACEGCKGFFRRSIQKNMVYTCHRDKNCIINKVTRNRCQYCRLQKCFEVGMSKESVRNDRNKKKKEVPKPECSESYTLTPEVGELIEKVRKAHQETFPALCQLGKYTTNNSSEQRVSLDIDLWDKFSELSTKCIIKTVEFAKQLPGFTTLTIADQITLLKAACLDILILRICTRYTPEQDTMTFSDGLTLNRTQMHNAGFGPLTDLVFAFANQLLPLEMDDAETGLLSAICLICGDRQDLEQPDRVDMLQEPLLEALKVYVRKRRPSRPHMFPKMLMKITDLRSISAKGAERVITLKMEIPGSMPPLIQEMLENSEGLDTLSGQPGGGGRDGGGLAPPPGSCSPSLSPSSNRSSPATHSP

SEQ ID NO: 47 - DNA, 1284 bp, Homo sapiens
cccaacagcaaccacgtggccagtggcgccggggaggcagccattgagacccagagcagcagttctgaagagatagtgcccagccctccctcgccaccccctctaccccgcatctacaagccttgctttgtctgtcaggacaagtcctcaggctaccactatggggtcagcgcctgtgagggctgcaagggcttcttccgccgcagcatccagaagaacatggtgtacacgtgtcaccgggacaagaactgcatcatcaacaaggtgacccggaaccgctgccagtactgccgactgcagaagtgctttgaagtgggcatgtccaaggagtctgtgagaaacgaccgaaacaagaagaagaaggaggtgcccaagcccgagtgctctgagagctacacgctgacgccggaggtgggggagctcattgagaaggtgcgcaaagcgcaccaggaaaccttccctgccctctgccagctgggcaaatacactacgaacaacagctcagaacaacgtgtctctctggacattgacctctgggacaagttcagtgaactctccaccaagtgcatcattaagactgtggagttcgccaagcagctgcccggcttcaccaccctcaccatcgccgaccagatcaccctcctcaaggctgcctgcctggacatcctgatcctgcggatctgcacgcggtacacgcccgagcaggacaccatgaccttctcggacgggctgaccctgaaccggacccagatgcacaacgctggcttcggccccctcaccgacctggtctttgccttcgccaaccagctgctgcccctggagatggatgatgcggagacggggctgctcagcgccatctgcctcatctgcggagaccgccaggacctggagcagccggaccgggtggacatgctgcaggagccgctgctggaggcgctaaaggtctacgtgcggaagcggaggcccagccgcccccacatgttccccaagatgctaatgaagattactgacctgcgaagcatcagcgccaagggggctgagcgggtgatcacgctgaagatggagatcccgggctccatgccgcctctcatccaggaaatgttggagaactcagagggcctggacactctgagcggacagccggggggtggggggcgggacgggggtggcctggcccccccgccaggcagctgtagccccagcctcagccccagctccaacagaagcagcccggccacccactccccgtgaccgcccacgccacatggacacagccctcgccct

SEQ ID NO: 48 - protein, 797 aa, Homo sapiens
MEPAPARSPRPQQDPARPQEPTMPPPETPSEGRQPSPSPSPTERAPASEEEFQFLRCQQCQAEAKCPKLLPCLHTLCSGCLEASGMQCPICQAPWPLGADTPALDNVFFESLQRRLSVYRQIVDAQAVCTRCKESADFWCFECEQLLCAKCFEAHQWFLKHEARPLAELRNQSVREFLDGTRKTNNIFCSNPNHRTPTLTSIYCRGCSKPLCCSCALLDSSHSELKCDISAEIQQRQEELDAMTQALQEQDSAFGAVHAQMHAAVGQLGRARAETEELIRERVRQVVAHVRAQERELLEAVDARYQRDYEEMASRLGRLDAVLQRIRTGSALVQRMKCYASDQEVLDMHGFLRQALCRLRQEEPQSLQAAVRTDGFDEFKVRLQDLSSCITQGKAIETQSSSSEEIVPSPPSPPPLPRIYKPCFVCQDKSSGYHYGVSACEGCKGFFRRSIQKNMVYTCHRDKNCIINKVTRNRCQYCRLQKCFEVGMSKESVRNDRNKKKKEVPKPECSESYTLTPEVGELIEKVRKAHQETFPALCQLGKYTTNNSSEQRVSLDIDLWDKFSELSTKCIIKTVEFAKQLPGFTTLTIADQITLLKAACLDILILRICTRYTPEQDTMTFSDGLTLNRTQMHNAGFGPLTDLVFAFANQLLPLEMDDAETGLLSAICLICGDRQDLEQPDRVDMLQEPLLEALKVYVRKRRPSRPHMFPKMLMKITDLRSISAKGAERVITLKMEIPGSMPPLIQEMLENSEGLDTLSGQPGGGGRDGGGLAPPPGSCSPSLSPSSNRSSPATHSP

SEQ ID NO: 49 - DNA, 3036 bp, Homo sapiens
ctccccttcagcttctcttcacgcactccaagatctaaaccgagaatcgaaactaagctggggtccatggagcctgcacccgcccgatctccgaggccccagcaggaccccgcccggccccaggagcccaccatgcctccccccgagaccccctctgaaggccgccagcccagccccagccccagccctacagagcgagcccccgcttcggaggaggagttccagtttctgcgctgccagcaatgccaggcggaagccaagtgcccgaagctgctgccttgtctgcacacgctgtgctcaggatgcctggaggcgtcgggcatgcagtgccccatctgccaggcgccctggcccctaggtgcagacacacccgccctggataacgtctttttcgagagtctgcagcggcgcctgtcggtgtaccggcagattgtggatgcgcaggctgtgtgcacccgctgcaaagagtcggccgacttctggtgctttgagtgcgagcagctcctctgcgccaagtgcttcgaggcacaccagtggttcctcaagcacgaggcccggcccctagcagagctgcgcaaccagtcggtgcgtgagttcctggacggcacccgcaagaccaacaacatcttctgctccaaccccaaccaccgcacccctacgctgaccagcatctactgccgaggatgttccaagccgctgtgctgctcgtgcgcgctccttgacagcagccacagtgagctcaagtgcgacatcagcgcagagatccagcagcgacaggaggagctggacgccatgacgcaggcgctgcaggagcaggatagtgcctttggcgcggttcacgcgcagatgcacgcggccgtcggccagctgggccgcgcgcgtgccgagaccgaggagctgatccgcgagcgcgtgcgccaggtggtagctcacgtgcgggctcaggagcgcgagctgctggaggctgtggacgcgcggtaccagcgcgactacgaggagatggccagtcggctgggccgcctggatgctgtgctgcagcgcatccgcacgggcagcgcgctggtgcagaggatgaagtgctacgcctcggaccaggaggtgctggacatgcacggtttcctgcgccaggcgctctgccgcctgcgccaggaggagccccagagcctgcaagctgccgtgcgcaccgatggcttcgacgagttcaaggtgcgcctgcaggacctcagctcttgcatcacccaggggaaagccattgagacccagagcagcagttctgaagagatagtgcccagccctccctcgccaccccctctaccccgcatctacaagccttgctttgtctgtcaggacaagtcctcaggctaccactatggggtcagcgcctgtgagggctgcaagggcttcttccgccgcagcatccagaagaacatggtgtacacgtgtcaccgggacaagaactgcatcatcaacaaggtgacccggaaccgctgccagtactgccgactgcagaagtgctttgaagtgggcatgtccaaggagtctgtgagaaacgaccgaaacaagaagaagaaggaggtgcccaagcccgagtgctctgagagctacacgctgacgccggaggtgggggagctcattgagaaggtgcgcaaagcgcaccaggaaaccttccctgccctctgccagctgggcaaatacactacgaacaacagctcagaacaacgtgtctctctggacattgacctctgggacaagttcagtgaactctccaccaagtgcatcattaagactgtggagttcgccaagcagctgcccggcttcaccaccctcaccatcgccgaccagatcaccctcctcaaggctgcctgcctggacatcctgatcctgcggatctgcacgcggtacacgcccgagcaggacaccatgaccttctcggacgggctgaccctgaaccggacccagatgcacaacgctggcttcggccccctcaccgacctggtctttgccttcgccaaccagctgctgcccctggagatggatgatgcggagacggggctgctcagcgccatctgcctcatctgcggagaccgccaggacctggagcagccggaccgggtggacatgctgcaggagccgctgctggaggcgctaaaggtctacgtgcggaagcggaggcccagccgcccccacatgttccccaagatgctaatgaagattactgacctgcgaagcatcagcgccaagggggctgagcgggtgatcacgctgaagatggagatcccgggctccatgccgcctctcatccaggaaatgttggagaactcagagggcctggacactctgagcggacagccggggggtggggggcgggacgggggtggcctggcccccccgccaggcagctgtagccccagcctcagccccagctccaacagaagcagcccggccacccactccccgtgaccgcccacgccacatggacacagccctcgccctccgccccggcttttctctgcctttctaccgaccatgtgaccccgcaccagccctgcccccacctgccctcccgggcagtactggggaccttccctgggggacggggagggaggaggcagcgactccttggacagaggcctgggccctcagtggactgcctgctcccacagcctgggctgacgtcagaggccgaggccaggaactgagtgaggcccctggtcctgggtctcaggatgggtcctgggggcctcgtgttcatcaagacacccctctgcccagctcaccacatcttcatcaccagcaaacgccaggacttggctcccccatcctcagaactcacaagccattgctccccagctggggaacctcaacctcccccctgcctcggttggtgacagagggggtgggacaggggcggggggttccccctgtacataccctgccataccaaccccaggtattaattctcgctggttttgtttttattttaatttttttgttttgatttttttaataagaattttcattttaagcaaaaaaaaa

SEQ ID NO: 50 - protein, 99 aa, Homo sapiens
DVSNTTTAQKRKCSQTQCPRKVIKMESEEGKEARLALPAPGPYSTPLRTPLWNGSNHSIETQSSSSEEIVPSPPSPPPLPRIYKPCFVCQDKSSGYHYG

SEQ ID NO: 51 - DNA, 296 bp, Homo sapiens
gatgtctccaatacaacgacagcccagaagaggaagtgcagccagacccagtgccccaggaaggtcatcaagatggagtctgaggaggggaaggaggcaaggttggctctccccgccccgggtccgtactccaccccgctccggactccgctttggaatggctcaaaccactccattgagacccagagcagcagttctgaagagatagtgcccagccctccctcgccaccccctctaccccgcatctacaagccttgctttgtctgtcaggacaagtcctcaggctaccactatgg

SEQ ID NO: 52 - protein, 858 aa, Homo sapiens [sequence omitted]

SEQ ID NO: 53 - protein, 277 aa, Homo sapiens
MASNSSSCPTPGGGHLNGYPVPPYAFFFPPMLGGLSPPGALTTLQHQLPVSGYSTPSPATGAKAFVCDQCGAQFSKEDALETHRQTHTGTDMAVFCLLCGKRFQAQSALQQHMEVHAGVRSYICSECNRTFPSHTALKRHLRSHTGDHPYECEFCGSCFRDESTLKSHKRIHTGEKPYECNGCDKKFSLKHQLETHYRVHTGEKPFECKLCHQRSRDYSAMIKHLRTHNGASPYQCTICTEYCPSLSSMQKHMKGHKPEEIPPDWRIEKTYLYLCYV

SEQ ID NO: 54 - protein, 2311 aa, Homo sapiens [sequence omitted]

SEQ ID NO: 55 - DNA, 6940 bp, Homo sapiens
taacatggcgcacagctgtcggtggcgcttccccgcccgacccgggaccaccgggggcggcggcggcggggggcgccggggcctagggggcggcccgcggcaacgcgtcccggccctgctgcttccccccgggcccccggtcggcggtggcggccccggggcgcccccctcccccccggctgtggcggccgcggcggcggcggcgggaagcagcggggctggggttccagggggagcggccgccgcctcagcagcctcctcgtcgtccgcctcgtcttcgtcttcgtcatcgtcctcagcctcttcagggccggccctgctccgggtgggcccgggcttcgacgcggcgctgcaggtctcggccgccatcggcaccaacctgcgccggttccgggccgtgtttggggagagcggcgggggaggcggcagcggagagctaacaacacagatcccatgtagttggagaaccaaaggccacatacatgacaaaaagactgaaccgttcaggttacttgcatggagttggtgcttaaatgatgagcaattcttaggttttggctcagatgaagaagtcagagtgcgaagtcccacaaggtctccttcagttaaaactagtcctcgaaaacctcgtgggagacctagaagtggctctgaccgaaattcagctatcctctcagatccatctgtgttttcccctctaaataaatcagagaccaaatctggagataagatcaagaagaaagattctaaaagtatagaaaagaagagaggaagacctcccaccttccctggagtaaaaatcaaaataacacatggaaaggacatttcagagttaccaaagggaaacaaagaagatagcctgaaaaaaattaaaaggacaccttctgctacgtttcagcaagccacaaagattaaaaaattaagagcaggtaaactctctcctctcaagtctaagtttaagacagggaagcttcaaataggaaggaagggggtacaaattgtacgacggagaggaaggcctccatcaacagaaaggataaagaccccttcgggtctcctcattaattctgaactggaaaagccccagaaagtccggaaagacaaggaaggaacacctccacttacaaaagaagataagacagttgtcagacaaagccctcgaaggattaagccagttaggattattccttcttcaaaaaggacagatgcaaccattgctaagcaactcttacagagggcaaaaaagggggctcaaaagaaaattgaaaaagaagcagctcagctgcagggaagaaaggtgaagacacaggtcaaaaatattcgacagttcatcatgcctgttgtcagtgctatctcctcgcggatcattaagacccctcggcggtttatagaggatgaggattatgaccctccaattaaaattgcccgattagagtctacaccgaatagtagattcagtgccccgtcctgtggatcttctgaaaaatcaagtgcagcttctcagcactcctctcaaatgtcttcagactcctctcgatctagtagccccagtgttgatacctccacagactctcaggcttctgaggagattcaggtacttcctgaggagcggagcgatacccctgaagttcatcctccactgcccatttcccagtccccagaaaatgagagtaatgataggagaagcagaaggtattcagtgtcggagagaagttttggatctagaacgacgaaaaaattatcaactctacaaagtgccccccagcagcagacctcctcgtctccacctccacctctgctgactccaccgccaccactgcagccagcctccagtatctctgaccacacaccttggcttatgcctccaacaatcccctttggcttatgctccaacaatccccttacttcaccctttttgcctgcttccactgctcctatgcaagggaagcgaaaatctattttgcgagaaccgacatttaggtggacttctttaaagcattctaggtcagagccacaatacttttcctcagcaaagtatgccaaagaaggtcttattcgcaaaccaatatttgataatttccgaccccctccactaactcccgaggacgttggctttgcatctggtttttctgcatctggtaccgctgcttcagcccgattgttttcgccactccattctggaacaaggtttgatatgcacaaaaggagccctcttctgagagctccaagatttactccaagtgaggctcactctagaatatttgagtctgtaaccttgcctagtaatcgaacttctgctggaacatcttcttcaggagtatccaatagaaaaaggaaaagaaaagtgtttagtcctattcgatctgaaccaagatctccttctcactccatgaggacaagaagtggaaggcttagtagttctgagctctcacctctcacccccccgtcttctgtctcttcctcgttaagcatttctgttagtcctcttgccactagtgccttaaacccaacttttacttttccttctcattccctgactcagtctggggaatctgcagagaaaaatcagagaccaaggaagcagactagtgctccggcagagccattttcatcaagtagtcctactcctctcttcccttggtttaccccaggctctcagactgaaagagggagaaataaagacaaggcccccgaggagctgtccaaagatcgagatgctgacaagagcgtggagaaggacaagagtagagagagagaccgggagagagaaaaggagaataagcgggagtcaaggaaagagaaaaggaaaaagggatcagaaattcagagtagttctgctttgtatcctgtgggtagggtttccaaagagaaggttgttggtgaagatgttgccacttcatcttctgccaaaaaagcaacagggcggaagaagtcttcatcacatgattctgggactgatattacttctgtgactcttggggatacaacagctgtcaaaaccaaaatacttataaagaaagggagaggaaatctggaaaaaaccaacttggacctcggcccaactgccccatccctggagaaggagaaaaccctctgcctttccactccttcatctagcactgttaaacattccacttcctccataggctccatgttggctcaggcagacaagcttccaatgactgacaagagggttgccagcctcctaaaaaaggccaaagctcagctctgcaagattgagaagagtaagagtcttaaacaaaccgaccagcccaaagcacagggtcaagaaagtgactcatcagagacctctgtgcgaggaccccggattaaacatgtctgcagaagagcagctgttgcccttggccgaaaacgagctgtgtttcctgatgacatgcccaccctgagtgccttaccatgggaagaacgagaaaagattttgttttccatggggaatgatgacaagtcatcaattgctggctcagaagatgctgaacctcttgctccacccatcaaaccaattaaacctgtcactagaaacaaggctccccaggaacctccagtaaagaaaggacgtcgatcgaggcggtgtgggcagtgtcccggctgccaggtgcctgaggactgtggtgtttgtactaattgcttagataagcccaagtttggtggtcgcaatataaagaagcagtgctgcaagatgagaaaatgtcagaatctacaatggatgccttccaaagcctacctgcagaagcaagctaaagctgtgaaaaagaaagagaaaaagtctaagaccagtgaaaagaaagacagcaaagagagcagtgttgtgaagaacgtggtggactctagtcagaaacctaccccatcagcaagagaggatcctgccccaaagaaaagcagtagtgagcctcctccacgaaagcccgtcgaggaaaagagtgaagaagggaatgtctcggcccctgggcctgaatccaaacaggccaccactccagcttccaggaagtcaagcaagcaggtctcccagccagcactggtcatcccgcctcagccacctactacaggaccgccaagaaaagaagttcccaaaaccactcctagtgagcccaagaaaaagcagcctccaccaccagaatcaggtccagagcagagcaaacagaaaaaagtggctccccgcccaagtatccctgtaaaacaaaaaccaaaagaaaaggaaaaaccacctccggtcaataagcaggagaatgcaggcactttgaacatcttcagcactctctccaatggcaatagttctaagcaaaaaattccagcagatggagtccacaggatcagagtggactttaagcagacctactccaatgaagtccattgtgttgaagagattctgaaggaaatgacccattcatggccgcctcctttgacagcaatacatacgcctagtacagctgagccatccaagtttcctttccctacaaaggactctcagcatgtcagttctgtaacccaaaaccaaaaacaatatgatacatcttcaaaaactcactcaaattctcagcaaggaacgtcatccatgctcgaagacgaccttcagctcagtgacagtgaggacagtgacagtgaacaaaccccagagaagcctccctcctcatctgcacctccaagtgctccacagtcccttccagaaccagtggcatcagcacattccagcagtgcagagtcagaaagcaccagtgactcagacagttcctcagactcagagagcgagagcagttcaagtgacagcgaagaaaatgagcccctagaaaccccagctccggagcctgagcctccaacaacaaacaaatggcagctggacaactggctgaccaaagtcagcagccagctgcgccaccagagggccccaggagcacagagcccccacggcggcacccagagagtaagggcagcagcgacagtgccacgagtcaggagcattctgaatccaaagatcctccccctaaaagctccagcaaagcccccgcgcccacccgaagccccccaccccggaaagaggagctgtcagaagtctccggcacagcaggagcccccacaaaggcaaaccgttggaaccaaacaacccaaaaaacctgtcaaggcctctgcccgggcaggttcacggaccagcctgcagggggaaagggagccagggcttcttccctatggctcccgagaccagacttccaaagacaagcccaaggtgaagacgaaaggacggccccgggccgcagcaagcaacgaacccaagccagcagtgcccccctccagtgagaagaagaagcacaagagctccctccctgccccctctaaggctctctcaggcccagaacccgcgaaggacaatgtggaggacaggacccctgagcactttgctcttgttcccctgactgagagccagggcccaccccacagtggcagcagcagcaggactagtggctgccgccaagccgtggtggtccaggaggacagccgcaaagacagactcccattgcctttgagagacaccaagctgctctcaccgctcagggacactcctcccccacaaagcttgatggtgaagatcaccctagacctgctctctcggataccccagcctcccgggaaggggagccgccagaggaaagcagaagataaacagccgcccgcagggaagaagcacagctctgagaagaggagctcagacagctcaagcaagttggccaaaaagagaaagggtgaagcagaaagagactgtgataacaagaaaatcagactggagaaggaaatcaaatcacagtcatcttcatcttcatcctcccacaaagaatcttctaaaacaaagccctccaggccctcctcacagtcctcaaagaaggaaatgctccccccgccacccgtgtcctcgtcctcccagaagccagccaagcctgcacttaagaggtcaaggcgggaagcagacacctgtggccaggaccctcccaaaagtgccagcagtaccaagagcaaccacaaagactcttccattcccaagcagagaagagtagaggggaagggctccagaagctcctcggagcacaagggttcttccggagatactgcaaatccttttccagtgccttctttgccaaatggtaactctaaaccagggaagcctcaagtgaagtttgacaaacaacaagcagaccttcacatgagggaggaaaaaaagatgaagcagaaagcagagttaatgacggacagggttggaaaggcttttaagtacctggaagccgtcttgtccttcattgagtgcggaattgccacagagtctgaaagccagtcatccaagtcagcttactctgtctactcagaaactgtagatctcattaaattcataatgtcattaaaatccttctcagatgccacagcgccaacacaagagaaaatatttgctgttttatgcatgcgttgccagtccattttgaacatggcgatgtttcgttgtaaaaaagacatagcaataaagtattctcgtactcttaataaacacttcgagagttcttccaaagtcgcccaggcaccttctccatgcattgcaagaagcacaggcacaccatcccctctttccccaatgccttctcctgccagctccgtagggtcccagtcaagtgctggcagtgtggggagcagtggggtggctgccactatcagcaccccagtcaccatccagaatatgacatcttcctatgtcaccatcacatcccatgttcttaccgcctttgacctttgggaacaggccgaggccctcacgaggaagaataaagaattctttgctcggctcagcacaaatgtgtgcaccttggccctcaacagcagtttggtggacctggtgcactatacacgacagggttttcagcagctacaagaattaaccaaaacaccttaa

SEQ ID NO: 56 - protein, 277 aa, Homo sapiens
EDPAPKKSSSEPPPRKPVEEKSEEGNVSAPGPESKQATTPASRKSSKQVSQPALVIPPQPPTTGPPRKEVPKTTPSEPKKKQPPPPESGPEQSKQKKVAPRPSIPVKQKPKEKEKPPPVNKQENAGTLNIFSTLSNGNSSKQKIPADGVHRIRVDFKEDCEAENVWEMGGLGILTSVPITPRVVCFLCASSGHVETYSNEVHCVEEILKEMTHSWPPPLTAIHTPSTAEPSKFPFPTKDSQHVSSVTQNQKQYDTSSKTHSNSQQGTSSMLEDQLQL

SEQ ID NO: 57 - DNA, 832 bp, Homo sapiens
gaggatcctgccccaaagaaaagcagtagtgagcctcctccacgaaagcccgtcgaggaaaagagtgaagaagggaatgtctcggcccctgggcctgaatccaaacaggccaccactccagcttccaggaagtcaagcaagcaggtctcccagccagcactggtcatcccgcctcagccacctactacaggaccgccaagaaaagaagttcccaaaaccactcctagtgagcccaagaaaaagcagcctccaccaccagaatcaggtccagagcagagcaaacagaaaaaagtggctccccgcccaagtatccctgtaaaacaaaaaccaaaagaaaaggaaaaaccacctccggtcaataagcaggagaatgcaggcactttgaacatcttcagcactctctccaatggcaatagttctaagcaaaaaattccagcagatggagtccacaggatcagagtggactttaaggaggattgtgaagcagaaaatgtgtgggagatgggaggcttaggaatcttgacttctgttcctataacacccagggtggtttgctttctctgtgccagtagtgggcatgtagagacctactccaatgaagtccattgtgttgaagagattctgaaggaaatgacccattcatggccgcctcctttgacagcaatacatacgcctagtacagctgagccatccaagtttcctttccctacaaaggactctcagcatgtcagttctgtaacccaaaaccaaaaacaatatgatacatcttcaaaaactcactcaaattctcagcaaggaacgtcatccatgctcgaagaccagcttcagctca

SEQ ID NO: 58 - protein, 164 aa, Homo sapiens
KQKKVAPRPSIPVKQKPKEKQTYSNEVHCVEEILKEMTHSWPPPLTAIHTPSTAEPSKFPFPTKDSQHVSSVTQNQKQYDTSSKTHSNSQQGTSSMLEDDLQLSDSEDSDSEQTPEKPPSSSAPPSAPQSLPEPVASAHSSSAESESTSDSDSSSDSESESSSS

SEQ ID NO: 59 - DNA, 495 bp, Homo sapiens
gcaaacagaaaaaagtggctccccgcccaagtatccctgtaaaacaaaaaccaaaagaaaagcagacctactccaatgaagtccattgtgttgaagagattctgaaggaaatgacccattcatggccgcctcctttgacagcaatacatacgcctagtacagctgagccatccaagtttcctttccctacaaaggactctcagcatgtcagttctgtaacccaaaaccaaaaacaatatgatacatcttcaaaaactcactcaaattctcagcaaggaacgtcatccatgctcgaagacgaccttcagctcagtgacagtgaggacagtgacagtgaacaaaccccagagaagcctccctcctcatctgcacctccaagtgctccacagtcccttccagaaccagtggcatcagcacattccagcagtgcagagtcagaaagcaccagtgactcagacagttcctcagactcagagagcgagagcagttcaagtg

SEQ ID NO: 60 - protein, 246 aa, Homo sapiens
KQKKVAPRPSIPVKQKPKEKEKPPPVNKQENAGTLNILSTLSNGNSSKQKIPADGVHRIRVDFKEDCEAENVWEMGGLGILTSVPITPRVVCFLCASSGHVEQTYSNEVHCVEEILKEMTHSWPPPLTAIHTPSTAEPSKFPFPTKDSQHVSSVTQNQKQYDTSSKTHSNSQQGTSSMLEDDLQLSDSEDSDSEQTPEKPPSSSAPPSAPQSLPEPVASAHSSSAESESTSDSDSSSDSESESSSS

SEQ ID NO: 61 - DNA, 741 bp, Homo sapiens
gcaaacagaaaaaagtggctccccgcccaagtatccctgtaaaacaaaaaccaaaagaaaaggaaaaaccacctccggtcaataagcaggagaatgcaggcactttgaacatcctcagcactctctccaatggcaatagttctaagcaaaaaattccagcagatggagtccacaggatcagagtggactttaaggaggattgtgaagcagaaaatgtgtgggagatgggaggcttaggaatcttgacttctgttcctatcacacccagggtggtttgctttctctgtgccagtagtgggcatgtagagcagacctactccaatgaagtccattgtgttgaagagattctgaaggaaatgacccattcatggccgcctcctttgacagcaatacatacgcctagtacagctgagccatccaagtttcctttccctacaaaggactctcagcatgtcagttctgtaacccaaaaccaaaaacaatatgatacatcttcaaaaactcactcaaattctcagcaaggaacgtcatccatgctcgaagacgaccttcagctcagtgacagtgaggacagtgacagtgaacaaaccccagagaagcctccctcctcatctgcacctccaagtgctccacagtcccttccagaaccagtggcatcagcacattccagcagtgcagagtcagaaagcaccagtgactcagacagttcctcagactcagagagcgagagcagttcaagtg

SEQ ID NO: 62 - skipped

SEQ ID NO: 63 - DNA, 14255 bp, Homo sapiens
gcggcggcggcggcgggaagcagcggggctggggttccagggggagcggccgccgcctcagcagcctcctcgtcgtccgcctcgtcttcgtcttcgtcatcgtcctcagcctcttcagggccggccctgctccgggtgggcccgggcttcgacgcggcgctgcaggtctcggccgccatcggcaccaacctgcgccggttccgggccgtgtttggggagagcggcgggggaggcggcagcggagaggatgagcaattcttaggttttggctcagatgaagaagtcagagtgcgaagtcccacaaggtctccttcagttaaaactagtcctcgaaaacctcgtgggagacctagaagtggctctgaccgaaattcagctatcctctcagatccatctgtgttttcccctctaaataaatcagagaccaaatctggagataagatcaagaagaaagattctaaaagtatagaaaagaagagaggaagacctcccaccttccctggagtaaaaatcaaaataacacatggaaaggacatttcagagttaccaaagggaaacaaagaagatagcctgaaaaaaattaaaaggacaccttctgctacgtttcagcaagccacaaagattaaaaaattaagagcaggtaaactctctcctctcaagtctaagtttaagacagggaagcttcaaataggaaggaagggggtacaaattgtacgacggagaggaaggcctccatcaacagaaaggataaagaccccttcgggtctcctcattaattctgaactggaaaagccccagaaagtccggaaagacaaggaaggaacacctccacttacaaaagaagataagacagttgtcagacaaagccctcgaaggattaagccagttaggattattccttcttcaaaaaggacagatgcaaccattgctaagcaactcttacagagggcaaaaaagggggctcaaaagaaaattgaaaaagaagcagctcagctgcagggaagaaaggtgaagacacaggtcaaaaatattcgacagttcatcatgcctgttgtcagtgctatctcctcgcggatcattaagacccctcggcggtttatagaggatgaggattatgaccctccaattaaaattgcccgattagagtctacaccgaatagtagattcagtgccccgtcctgtggatcttctgaaaaatcaagtgcagcttctcagcactcctctcaaatgtcttcagactcctctcgatctagtagccccagtgttgatacctccacagactctcaggcttctgaggagattcaggtacttcctgaggagcggagcgatacccctgaagttcatcctccactgcccatttcccagtccccagaaaatgagagtaatgataggagaagcagaaggtattcagtgtcggagagaagttttggatctagaacgacgaaaaaattatcaactctacaaagtgccccccagcaggagacctcctcgtctccacctccacctctgctgactccaccgccaccactgcagccagcctccagtatctctgaccacacaccttggcttatgcctccaacaatccccttagcatcaccatttttgcctgcttccactgctcctatgcaagggaagcgaaaatctattttgcgagaaccgacatttaggtggacttctttaaagcattctaggtcagagccacaatacttttcctcagcaaagtatgccaaagaaggtcttattcgcaaaccaatatttgataatttccgaccccctccactaactcccgaggacgttggctttgcatctggtttttctgcatctggtaccgctgcttcagcccgattgttttcgccactccattctggaacaaggtttgatatgcacaaaaggagccctcttctgagagctccaagatttactccaagtgaggctcactctagaatatttgagtctgtaaccttgcctagtaatcgaacttctgctggaacatcttcttcaggagtatccaatagaaaaaggaaaagaaaagtgtttagtcctattcgatctgaaccaagatctccttctcactccatgaggacaagaagtggaaggcttagtagttctgagctctcacctctcacccccccgtcttctgtctcttcctcgttaagcatttctgttagtcctcttgccactagtgccttaaacccaacttttacttttccttctcattccctgactcagtctggggaatctgcagagaaaaatcagagaccaaggaagcagactagtgctccggcagagccattttcatcaagtagtcctactcctctcttcccttggtttaccccaggctctcagactgaaagagggagaaataaagacaaggcccccgaggagctgtccaaagatcgagatgctgacaagagcgtggagaaggacaagagtagagagagagaccgggagagagaaaaggagaataagcgggagtcaaggaaagagaaaaggaaaaagggatcagaaattcagagtagttctgctttgtatcctgtgggtagggtttccaaagagaaggttgttggtgaagatgttgccacttcatcttctgccaaaaaagcaacagggcggaagaagtcttcatcacatgattctgggactgatattacttctgtgactcttggggatacaacagctgtcaaaaccaaaatacttataaagaaagggagaggaaatctggaaaaaaccaacttggacctcggcccaactgccccatccctggagaaggagaaaaccctctgcctttccactccttcatctagcactgttaaacattccacttcctccataggctccatgttggctcaggcagacaagcttccaatgactgacaagagggttgccagcctcctaaaaaaggccaaagctcagctctgcaagattgagaagagtaagagtcttaaacaaaccgaccagcccaaagcacagggtcaagaaagtgactcatcagagacctctgtgcgaggaccccggattaaacatgtctgcagaagagcagctgttgcccttggccgaaaacgagctgtgtttcctgatgacatgcccaccctgagtgccttaccatgggaagaacgagaaaagattttgtcttccatggggaatgatgacaagtcatcaattgctggctcagaagatgctgaacctcttgctccacccatcaaaccaattaaacctgtcactagaaacaaggcaccccaggaacctccagtaaagaaaggacgtcgatcgaggcggtgtgggcagtgtcccggctgccaggtgcctgaggactgtggtgtttgtactaattgcttagataagcccaagtttggtggtcgcaatataaagaagcagtgctgcaagatgagaaaatgtcagaatctacaatggatgccttccaaagcctacctgcagaagcaagctaaagctgtgaaaaagaaagagaaaaagtctaagaccagtgaaaagaaagacagcaaagagagcagtgttgtgaagaacgtggtggactctagtcagaaacctaccccatcagcaagagaggatcctgccccaaagaaaagcagtagtgagcctcctccacgaaagcccgtcgaggaaaagagtgaagaagggaatgtctcggcccctgggcctgaatccaaacaggccaccactccagcttccaggaagtcaagcaagcaggtctcccagccagcactggtcatcccgcctcagccacctactacaggaccgccaagaaaagaagttcccaaaaccactcctagtgagcccaagaaaaagcagcctccaccaccagaatcaggtccagagcagagcaaacagaaaaaagtggctccccgcccaagtatccctgtaaaacaaaaaccaaaagaaaaggaaaaaccacctccggtcaataagcaggagaatgcaggcactttgaacatcctcagcactctctccaatggcaatagttctaagcaaaaaattccagcagatggagtccacaggatcagagtggactttaaggaggattgtgaagcagaaaatgtgtgggagatgggaggcttaggaatcttgacttctgttcctataacacccagggtggtttgctttctctgtgccagtagtgggcatgtagagtttgtgtattgccaagtctgttgtgagcccttccacaagttttgtttagaggagaacgagcgccctctggaggaccagctggaaaattggtgttgtcgtcgttgcaaattctgtcacgtttgtggaaggcaacatcaggctacaaagcagctgctggagtgtaataagtgccgaaacagctatcaccctgagtgcctgggaccaaactaccccaccaaacccacaaagaagaagaaagtctggatctgtaccaagtgtgttcgctgtaagagctgtggatccacaactccaggcaaagggtgggatgcacagtggtctcatgatttctcactgtgtcatgattgcgccaagctctttgctaaaggaaacttctgccctctctgtgacaaatgttatgatgatgatgactatgagagtaagatgatgcaatgtggaaagtgtgatcgctgggtccattccaaatgtgagaatctttcaggtacagaagatgagatgtatgagattctatctaatctgccagaaagtgtggcctacacttgtgtgaactgtactgagcggcaccctgcagagtggcgactggcccttgaaaaagagctgcagatttctctgaagcaagttctgacagctttgttgaattctcggactaccagccatttgctacgctaccggcaggctgccaagcctccagacttaaatcccgagacagaggagagtataccttcccgcagctcccccgaaggacctgatccaccagttcttactgaggtcagcaaacaggatgatcagcagcctttagatctagaaggagtcaagaggaagatggaccaagggaattacacatctgtgttggagttcagtgatgatattgtgaagatcattcaagcagccattaattcagatggaggacagccagaaattaaaaaagccaacagcatggtcaagtccttcttcattcggcaaatggaacgtgtttttccatggttcagtgtcaaaaagtccaggttttgggagccaaataaagtatcaagcaacagtgggatgttaccaaacgcagtgcttccaccttcacttgaccataattatgctcagtggcaggagcgagaggaaaacagccacactgagcagcctcctttaatgaagaaaatcattccagctcccaaacccaaaggtcctggagaaccagactcaccaactcctctgcatcctcctacaccaccaattttgagtactgataggagtcgagaagacagtccagagctgaacccacccccaggcatagaagacaatagacagtgtgcgttatgtttgacttatggtgatgacagtgctaatgatgctggtcgtttactatatattggccaaaatgagtggacacatgtaaattgtgctttgtggtcagcggaagtgtttgaagatgatgacggatcactaaagaatgtgcatatggctgtgatcaggggcaagcagctgagatgtgaattctgccaaaagccaggagccaccgtgggttgctgtctcacatcctgcaccagcaactatcacttcatgtgttcccgagccaagaactgtgtctttctggatgataaaaaagtatattgccaacgacatcgggatttgatcaaaggcgaagtggttcctgagaatggatttgaagttttcagaagagtgtttgtggactttgaaggaatcagcttgagaaggaagtttctcaatggcttggaaccagaaaatatccacatgatgattgggtctatgacaatcgactgcttaggaattctaaatgatctctccgactgtgaagataagctctttcctattggatatcagtgttccagggtatactggagcaccacagatgctcgcaagcgctgtgtatatacatgcaagatagtggagtgccgtcctccagtcgtagagccggatatcaacagcactgttgaacatgatgaaaacaggaccattgcccatagtccaacatcttttacagaaagttcatcaaaagagagtcaaaacacagctgaaattataagtcctccatcaccagaccgacctcctcattcacaaacctctggctcctgttattatcatgtcatctcaaaggtccccaggattcgaacacccagttattctccaacacagagatcccctggctgtcgaccgttgccttctgcaggaagtcctaccccaaccactcatgaaatagtcacagtaggtgatcctttactctcctctggacttcgaagcattggctccaggcgtcacagtacctcttccttatcaccccagcggtccaaactccggataatgtctccaatgagaactgggaatacttactctaggaataatgtttcctcagtctccaccaccgggaccgctactgatcttgaatcaagtgccaaagtagttgatcatgtcttagggccactgaattcaagtactagtttagggcaaaacacttccacctcttcaaatttgcaaaggacagtggttactgtaggcaataaaaacagtcacttggatggatcttcatcttcagaaatgaagcagtccagtgcttcagacttggtgtccaagagctcctctttaaagggagagaagaccaaagtgctgagttccaagagctcagagggatctgcacataatgtggcttaccctggaattcctaaactggccccacaggttcataacacaacatctagagaactgaatgttagtaaaatcggctcctttgctgaaccctcttcagtgtcgttttcttctaaagaggccctctccttcccacacctccatttgagagggcaaaggaatgatcgagaccaacacacagattctacccaatcagcaaactcctctccagatgaagatactgaagtcaaaaccttgaagctatctggaatgagcaacagatcatccattatcaacgaacatatgggatctagttccagagataggagacagaaagggaaaaaatcctgtaaagaaactttcaaagaaaagcattccagtaaatcttttttggaacctggtcaggtgacaactggtgaggaaggaaacttgaagccagagtttatggatgaggttttgactcctgagtatatgggccaacgaccatgtaacaatgtttcttctgataagattggtgataaaggcctttctatgccaggagtccccaaagctccacccatgcaagtagaaggatctgccaaggaattacaggcaccacggaaacgcacagtcaaagtgacactgacacctctaaaaatggaaaatgagagtcaatccaaaaatgccctgaaagaaagtagtcctgcttcccctttgcaaatagagtcaacatctcccacagaaccaatttcagcctctgaaaatccaggagatggtccagtggcccaaccaagccccaataatacctcatgccaggattctcaaagtaacaactatcagaatcttccagtacaggacagaaacctaatgcttccagatggccccaaacctcaggaggatggctcttttaaaaggaggtatccccgtcgcagtgcccgtgcacgttctaacatgttttttgggcttaccccactctatggagtaagatcctatggtgaagaagacattccattctacagcagctcaactgggaagaagcgaggcaagagatcagctgaaggacaggtggatggggccgatgacttaagcacttcagatgaagacgacttatactattacaacttcactagaacagtgatttcttcaggtggagaggaacgactggcatcccataatttatttcgggaggaggaacagtgtgatcttccaaaaatctcacagttggatggtgttgatgatgggacagagagtgatactagtgtcacagccacaacaaggaaaagcagccagattccaaaaagaaatggtaaagaaaatggaacagagaacttaaagattgatagacctgaagatgctggggagaaagaacatgtcactaagagttctgttggccacaaaaatgagccaaagatggataactgccattctgtaagcagagttaaaacacagggacaagattccttggaagctcagctcagctcattggagtcaagccgcagagtccacacaagtaccccctccgacaaaaatttactggacacctataatactgagctcctgaaatcagattcagacaataacaacagtgatgactgtgggaatatcctgccttcagacattatggactttgtactaaagaatactccatccatgcaggctttgggtgagagcccagagtcatcttcatcagaactcctgaatcttggtgaaggattgggtcttgacagtaatcgtgaaaaagacatgggtctttttgaagtattttctcagcagctgcctacaacagaacctgtggatagtagtgtctcttcctctatctcagcagaggaacagtttgagttgcctctagagctaccatctgatctgtctgtcttgaccacccggagtcccactgtccccagccagaatcccagtagactagctgttatctcagactcaggggagaagagagtaaccatcacagaaaaatctgtagcctcctctgaaagtgacccagcactgctgagcccaggagtagatccaactcctgaaggccacatgactcctgatcattttatccaaggacacatggatgcagaccacatctctagccctccttgtggttcagtagagcaaggtcatggcaacaatcaggatttaactaggaacagtagcacccctggccttcaggtacctgtttccccaactgttcccatccagaaccagaagtatgtgcccaattctactgatagtcctggcccgtctcagatttccaatgcagctgtccagaccactccaccccacctgaagccagccactgagaaactcatagttgttaaccagaacatgcagccactttatgttctccaaactcttccaaatggagtgacccaaaaaatccaattgacctcttctgttagttctacacccagtgtgatggagacaaatacttcagtattgggacccatgggaggtggtctcacccttaccacaggactaaatccaagcttgccaacttctcaatctttgttcccttctgctagcaaaggattgctacccatgtctcatcaccagcacttacattccttccctgcagctactcaaagtagtttcccaccaaacatcagcaatcctccttcaggcctgcttattggggttcagcctcctccggatccccaacttttggtttcagaatccagccagaggacagacctcagtaccacagtagccactccatcctctggactcaagaaaagacccatatctcgtctacagacccgaaagaataaaaaacttgctccctctagtaccccttcaaacattgccccttctgatgtggtttctaatatgacattgattaacttcacaccctcccagcttcctaatcatccaagtctgttagatttggggtcacttaatacttcatctcaccgaactgtccccaacatcataaaaagatctaaatctagcatcatgtattttgaaccggcacccctgttaccacagagtgtgggaggaactgctgccacagcggcaggcacatcaacaataagccaggatactagccacctcacatcagggtctgtgtctggcttggcatccagttcctctgtcttgaatgttgtatccatgcaaactaccacaacccctacaagtagtgcgtcagttccaggacacgtcaccttaaccaacccaaggttgcttggtaccccagatattggctcaataagcaatcttttaatcaaagctagccagcagagcctggggattcaggaccagcctgtggctttaccgccaagttcaggaatgtttccacaactggggacatcacagaccccctctactgctgcaataacagcggcatctagcatctgtgtgctcccctccactcagactacgggcataacagccgcttcaccttctggggaagcagacgaacactatcagcttcagcatgtgaaccagctccttgccagcaaaactgggattcattcttcccagcgtgatcttgattctgcttcagggccccaggtatccaactttacccagacggtagacgctcctaatagcatgggactggagcagaacaaggctttatcctcagctgtgcaagccagccccacctctcctgggggttctccatcctctccatcttctggacagcggtcagcaagcccttcagtgccgggtcccactaaacccaaaccaaaaaccaaacggtttcagctgcctctagacaaagggaatggcaagaagcacaatgtttcccatttgcggaccagttcttctgaagcacacattccagaccaagaaacgacatccctgacctcaggcacagggactccaggagcagaggctgagcagcaggatacagctagcgtggagcagtcctcccagaaggagtgtgggcaacctgcagggcaagtcgctgttcttccggaagttcaggtgacccaaaatccagcaaatgaacaagaaagtgcagaacctaaaacagtggaagaagaggaaagtaatttcagctccccactgatgctttggcttcagcaagaacaaaagcggaaggaaagcattactgagaaaaaacccaagaaaggacttgtttttgaaatttccagtgatgatggctttcagatctgtgcagaaagtattgaagatgcctggaagtcattgacagataaagtccaggaagctcgatcaaatgcccgcctaaagcagctctcatttgcaggtgttaacggtttgaggatgctggggattctccatgatgcagttgtgttcctcattgagcagctgtctggtgccaagcactgtcgaaattacaaattccgtttccacaagccagaggaggccaatgaaccccccttgaaccctcacggctcagccagggctgaagtccacctcaggaagtcagcatttgacatgtttaacttcctggcttctaaacatcgtcagcctcctgaatacaaccccaatgatgaagaagaggaggaggtacagctgaagtcagctcggagggcaactagcatggatctgccaatgcccatgcgcttccggcacttaaaaaagacttctaaggaggcagttggtgtctacaggtctcccatccatggccggggtcttttctgtaagagaaacattgatgcaggtgagatggtgattgagtatgccggcaacgtcatccgctccatccagactgacaagcgggaaaagtattacgacagcaagggcattggttgctatatgttccgaattgatgactcagaggtagtggatgccaccatgcatggaaatgctgcacgcttcatcaatcactcgtgtgagcctaactgctattctcgggtcatcaatattgatgggcagaagcacattgtcatctttgccatgcgtaagatctaccgaggagaggaactcacttacgactataagttccccattgaggatgccagcaacaagctgccctgcaactgtggcgccaagaaatgccggaagttcctaaactaaagctgctcttctcccccagtgttggagtgcaaggaggcggggccatccaaagcaacgctgaaggccttttccagcagctgggagctcccggattgcgtggcacagctgaggggcctctgtgatggctgagctctcttatgtcctatactcacatcagacatgtgatcatagtcccagagacagagttgaggtctcgaagaaaagatccatgatcggctttctcctggggcccctccaattgtttactgttagaaagtgggaatggggtccctagcagacttgcctggaaggagcctattatagagggttggttatgttgggagattgggcctgaatttctccacagaaataagttgccatcctcaggttggccctttcccaagcactgtaagtgagtgggtcagccaaagccccaaatggagggttggttagattcctgacagtttgccagccagccgccacctacagcgtctgtcgaacaaacagaggtctggtggttttccctactgtcctcccactcgagagttcacttctggttgggagacaggattcctagcacctccggtgtcaaaaggctgtcatggggttgtgccaattaattaccaaacattgagcctgcaggctttgagtgggagtgttgcccccaggagccttatctcagccaattacctttcttgacagtaggagcggcttccctctcccattccctcttcactcccttttcttcctttcccctgtcttcatgccactgctttcccatgcttctttcggttgtaggggagactgactgcctgctcaaggacactccctgctgggcataggatgtgcctgcaaaaagttccctgagcctgtaagcactccaggtggggaagtggacaggagccattggtcataaccagacagaatttggaaacattttcataaagctccatggagagttttaaagaaacatatgtagcatgattttgtaggagaggaaaaagattatttaaataggatttaaatcatgcaacaacgagagtatcacagccaggatgacccttgggtcccattcctaagacatggttactttattttccccttgttaagacataggaagacttaatttttaaacggtcagtgtccagttgaaggcagaacactaatcagatttcaaggcccacaacttggggactagaccaccttatgttgagggaactctgccacctgcgtgcaacccacagctaaagtaaattcaatgacactactgccctgattactccttaggatgtggtcaaaacagcatcaaatgtttcttctcttcctttccccaagacagagtcctgaacctgttaaattaagtcattggattttactctgttctgtttacagtttactatttaaggttttataaatgtaaatatattttgtatatttttctatgagaagcacttcatagggagaagcacttatgacaaggctattttttaaaccgcggtattatcctaatttaaaagaagatcggtttttaataattttttattttcataggatgaagttagagaaaatattcagctgtacacacaaagtctggtttttcctgcccaacttccccctggaaggtgtactttttgttgtttaatgtgtagcttgtttgtgccctgttgacataaatgtttcctgggtttgctctttgacaataaatggagaaggaaggtcacccaactccattgggccactcccctccttcccctattgaagctcctcaaaaggctacagtaatatcttgatacaacagattctcttctttcccgcctctctcctttccggcgcaacttccagagtggtgggagacggcaatctttacatttccctcatctttcttacttcagagttagcaaacaacaagttgaatggcaacttgacatttttgcatcaccatctgcctcataggccactctttcctttccctctgcccaccaagtcctcatatctgcagagaacccattgatcaccttgtgccctcttttggggcagcctgttgaaactgaagcacagtctgaccactcacgataaagcagattttctctgcctctgccacaaggtttcagagtagtgtagtccaagtagagggtggggcacccttttctcgccgcaagaagcccattcctatggaagtctagcaaagcaatacgactcagcccagcactctctgccccaggactcatggctctgctgtgccttccatcctgggctcccttctctcctgtgaccttaagaactttgtctggtggctttgctggaacattgtcactgttttcactgtcatgcagggagcccagcactgtggccaggatggcagagacttccttgtcatcatggagaagtgccagcaggggactgggaaaagcactctacccagacctcacctcccttcctccttttgcccatgaacaagatgcagtggccctaggggttccactagtgtctgctttcctttattattgcactgtgtgaggtttttttgtaaatccttgtattcc

SEQ ID NO: 64 - protein, 149 aa, Homo sapiens
KQKKVAPRPSIPVKQKPKEKEMTHSWPPPLTAIHTPSTAEPSKFPFPTKDSQHVSSVTQNQKQYDTSSKTHSNSQQGTSSMLEDDLQLSDSEDSDSEQTPEKPPSSSAPPSAPQSLPEPVASAHSSSAESESTSDSDSSSDSESESSSS

SEQ ID NO: 65 - DNA, 450 bp, Homo sapiens
gcaaacagaaaaaagtggctccccgcccaagtatccctgtaaaacaaaaaccaaaagaaaaggaaatgacccattcatggccgcctcctttgacagcaatacatacgcctagtacagctgagccatccaagtttcctttccctacaaaggactctcagcatgtcagttctgtaacccaaaaccaaaaacaatatgatacatcttcaaaaactcactcaaattctcagcaaggaacgtcatccatgctcgaagacgaccttcagctcagtgacagtgaggacagtgacagtgaacaaaccccagagaagcctccctcctcatctgcacctccaagtgctccacagtcccttccagaaccagtggcatcagcacattccagcagtgcagagtcagaaagcaccagtgactcagacagttcctcagactcagagagcgagagcagttcaagtg

SEQ ID NO: 66 - protein, 149 aa, Homo sapiens; identical to SEQ ID NO: 64

SEQ ID NO: 67 - DNA, 450 bp, Homo sapiens; identical to SEQ ID NO: 65

SEQ ID NO: 68 - DNA, 6983 bp, Homo sapiens
tggtcatcccgcctcagccacctactacaggaccgccaagaaaagaagttcccaaaaccactcctagtgagcccaagaaaaagcagcctccaccaccagaatcaggtgagtgaggagggcaagaaggaattgctgacccacaagtactaacaaaaaagcactgatgtctcaaacagcatttgaaagcaggaaatgtatgatttgaagtcttcagttcaagaaaatcagctctctttctaactattatgtttaataataaagaaacagaaacaaaaaaaacagttaaattggaggtattgttttaatttcctgttcgaagcctagagtttaaatagttttttttttttttttctaatggccctttcttcacaggtcagtcagtactaaagtagtcgttgccagcatctgactgcaatttattctgaattttttaggtccagagcagagcaaacagaaaaaagtggctccccgcccaagtatccctgtaaaacaaaaaccaaaagaaaaggtgaggagagatttgtttctctgccatttctcagggatgtattctattttgtagggaaaagccttatccttgacttctatgtagatggcagtggaatttcttaaaattaagaaacttcaagtttaggcttttagctgggcacggtggctcacgctggtaatcccaacacttagtgaggctgaggtgggaggattgcttgaggccagcagttcaagaccagcctgggcaacatagcaagaccctgtctttatttaaaccaaaaaaaaaaaaagaagaagaagaagttagccaggcatggtggcagttgcgtgtagtcccaggtactcaggaggctgagatagaaggattgtcttgagcccaggaattcaaggctgtagtgagctatgattgtaccactgcagtccagcctgggtgacaaagcaaaacactgtctccaaaaaaaatttaggcttggcaaggcgcagcggctcacgcctgtgatcccagcactttgggaagccgaagcaggcagatcacttgaggtcaggagttggagaccagcctggccaacatggtgaaaccctgtctctactgaaaatacaaaaattagccggttgtggtagtgggtgcttggtaatcctagctacttgggaggctgaggcagggggaattgcctgaaacctgcgaggcggaggctgcagtgagccgagattgcatcattgcactctagcctggacaacagagctagactccatcccaaaaaaaaaaaaaaaaagtagccgggcacggtggctcacgcctgtaatcccagcactttgggaggccgaggcgggcggatcatgagggcaggagatcgagaccatcctggctaacacggtgaaaccctgtctctactaaaaatacaaaaaattagcccggcgaggtggcgggcgcctgtagtcccagctactcaggagagtgagccaggagaatggcgtgaacccggggggcggagcctgcagtgagccgagatcgcgccactgcactccagcttgggtgacaccgagactccgtctcaaaaaaaaataaaaagtttaggctttagcctgtttcttttttggtttcttccttgttgcttttcccttctttgtggccccacatgttctagcctaggaatctgcttattctaaaggccatttggcgtaattattttttgaccccaacatcctttagcaattatttgtctgtaaaaatcacccttccctgtattcactatttttatttattatggataaagagatagtgtggtggctcacatctataatcccagcactttgggggcccaaggcgggaggatcacttgagggcaggagctggagaccagcctgggcagcacagtgacacacagttgctataaaaaatttaaaacccaactaggcatggtggcatgcacctgtagtcccagctactcttgagaagctgaggcaggaggatcacgagcccacaaggtctaggctgcagtgagctgtgactgtgccactgtattgcagcctaggcaacaaagcaagacccagtctcttttaaaaaaaaattcaaagattattgtttatgttggaaacatgttttttagatctattaataaaatttgtcatttgcattattatctgttgcaaatgtgaaggcaaatagggtgtgattttgttctatattcatcttttgtctccttaggaaaaaccacctccggtcaataagcaggagaatgcaggcactttgaacatcctcagcactctctccaatggcaatagttctaagcaaaaaattccagcagatggagtccacaggatcagagtggactttaaggtaaaggtgttcagtgatcataaagtatattgagtgtcaaagactttaaataaagaaaatgctactaccaaaggtgttgaaagaggaaatcagcaccaactgggggaatgaataagaactcccattagcaggtgggtttagcgctgggagagctttggacagtgttgttaggtcactgtttgtgaactgactgcagaacatacataatgaaacattcctatccatcctgaggagtatcagaggaagtaattccttcacatggaaagtatcaaaccatgatgattccttgagtcagcaaaactgtaagagaaattcaatcccagtgtattttcgcaatatcttcactatgaattgaacaactaggtgagccttttaatagtccgtgtctgagattaaaactttttaaagcagcagttatttttggactcattgaaatgaaatactctgacattgtgatgtcacactaattttatgcttttcatccttattttccatccaaagttgtgtaattgtaaaactttcctaagtgacctttctctctccacaggaggattgtgaagcagaaaatgtgtgggagatgggaggcttaggaatcttgacttctgttcctataacacccagggtggtttgctttctctgtgccagtagtgggcatgtagaggtaaggcatcctgcttctttgtaccccaggaagtacataaatgattgatctggggatgagattactatagtctgttttgttggtatttagcaggtactattccctgtttaaaccagctaaagaaatgttttgaagtattttagagattttaggaaggaatctgctattagagtagcaaagttattgagagtgaaaagatcaataatcccatctctcttaaattcagtctttattagagttctgatctttctgttagatgtctaaataagagaaaaaattatacagtggtctattaaaagggatgctattgatggttattttatattgtatatcaaagcctcttcatctataaggagctcttaccaattaataagaaaaaggaatgacatccagaaaaaaaaataggcaaaagacagaaatagataattcacaaaattagaaataaatacatgttgggtggcagggggaggtgaagggagggtgtctgttttttagccctctagtgaccaaaaactggaaattaaagcatgataaaaaaagaatcctgaataaatggggactttctgttggtggaaagaaatatagattagttacaatctttctttctgagggaattatttggaaatatatatatctatctttaaaataggtatatccgaatattatggctttaagaaaatatgagtgggaaataatgtttctaatggacagagctatggagttagaatgcatgggttcattctacttcacatttaaatgggacagtatttcctgagctagagggctgttgtgagaattaaatgggatatgtttgcctgacatttagtatattgtgagatataccacctttccttgacatattgtgttagtaaaagaaaatttatgctgtaggaaaattgtatattatccatcttcaagtagtctgtatagatgttacagctgtgcctagaagtcagcagaatcccaagaaatatctttgtgttttaggttggtttgctggtgtttcacagttgttgtgatgaagtaatgaaactctgtgtcatggatttaattttagtcaagtttttaaatgttacactttttcaataagagacttgaatagatattttatgccctaataaagtactgaatacttgctgtagtttcaggattccagaattgcattagttgtgagaagtatatggggcaagggctagtgtgtaaagggctttttgagccccgtcacatttgagcattgtgacaaatagaaaaaattatagtactgaactgaacactgatgtataaagtgttaattctgtgacctgggtcacaaatttagtaaggaaaggtgtaagattaaacatattttcatggaatctctgaaggttcctgaatccaatatagaagataggcaacatttgtattgactgatagagtaagatggttttacagggtaggaagctggaatgtcccaagatattcattcagtttttggttcacatagtattgatgagtatataaacttctttaaaatagtatggaggccaggcacagtggctcacgcctgtaatcccaacactttgggaagccgaggcaggaggattcctcgagcccaggagtttgagaccaacctggacaacatggtgagactgtctctacaaaacattttaaaaattagcggctgggcacggtggctcatgtctataatctcagcactttgggaggctgaggtgggtggatcatctgaggtcaggaattcgagaccagcctgggcaacagggtgaaaccctgtctctactaaaaatgcaaaaattagccaggcatggtggtgggtgcctgtaatcctcaggaggctgaggaaggagaattgcttgaacccaggaagcggaggttgcagtaaagtcgagatcgcgtcattgcactccagcctgggcaacaagagtgaaattccgtctcaaaagaaaaaaaaaaaaaagccgggtgttgtggcatgcacctgcggtcccagctgctcaggaggctgaggtaggaggatcacttgagcacaggaagtgtaggctgcagtgagctgtgttcgtgccactgcactccagcctggctgacagactctgtcacaagaaaaaataatatagtgtggggacaccaacctttattttatgtgtcttaatgtggtgcattagtctgctttcacactgctgataaagacatacctgagactgggcaatttacaaaggaaagaggtttagtggagaactcacagttccacatggaagcctcacagtcatgcggaaggcaaggaggagcaggtcacgtctacgtgagtggcggcaaagagagaggttgtgcagggaaactcctgtttttaaaaccatcagatctcatgagactcactgttacaagaacagcacgggaaagacctgcccccatgatcgaattacctcccaccagctccctcccacaacacatgggaattcaagatgagatttgggtggggacacagccaaatcatgtcatgtgaattaggaagaaatataaaccagcatatcaaacaaacctagggtttcacaaatattgcttaggatgaggtgaggttaaaaaaaaaaaagtgggttgatcataaactgatctaaaaaaatagtacaagtagtattatgacgcagtgccgctatcaaagtagtatagaaatgaccgaagtttgggaaaaactgttttggactgtcctcatatcatggaggaaagactggttaaagatggggcagtgtcagaagaaaaataagttttaggccggaggtaattttaaacattttcttgccttaccagcggatggcttccttgtgcttaaagaacttaaacagttgagaattaaattttgcccattatttttcccccccctttctctgtgcaacctctctgccccttaataaatgtttttggtactgactactgctgctcctgctaataccatcctgtagaaatttttcttgagtgaggaatagtttttagaaggcttttatgatgataacttttaaatttatttttaactatgccagcaggttattagatatataggttcaaaggagattgaggctggagtctgttcaaacattttcagaggtgaagatgacacagggttcatggagatttccttcatggtaccagaacagggcagggtttcactgcatgataatacccatgtttccattgcttgtagacctaatcatttttacttattgattggcactgtgggccaagatcgtgacatccatcctaataagcaggtctcatcaaaagccttagaatggagaaaattttaataatgctttattagttggttaagtaagccctgatgtttggctttctagtgaccggtcattgccctgcagactctgtaatgggacagtttggctgggtgtagggggtcatgccaggctgaggtgggaggattactgtaggccaggagttttgagactagcctaggcaacatagaccgccccccatccctataaatatttaacaattagctgagcataatggtgtgtgtgcttgtagtcttagctgctgaggaggctgaggtgagaggatcacttcagctcaagagcttgaggttacagtgagctatatgattgcaccagtgaactccagcctgggcaacacagtgagaccctgtctcaaaacaaaaacaaaaacaaaaacaggtagggagagacaaggagaagggtagtactgacatggcctgtctttactttcccctctcagccctggaactctccacagggaaaggttttttgttccttcttcttgtctaataaatggcttgacttgaggggtatcttggaggcattctcaacccaaccctgaaggtttatcagcactttcctggtggacagcacctcagcctctgccctggctcctttcatcctcatcccctagagccaggatcgggaagctggagtggtggcctgtttggattcaggcccaggggccgagacattcccttcttcactcttttccggatcc

SEQ ID NO: 69 - protein, 198 aa, Homo sapiens
ISLPSPVPPLSPIHSNQQTLPRTQGSSKVHGSSNNSKGYCPAKSPKDLAVKVHDKETPQDSLVAPAQPPSQTFPPPSLPSKSVAMQQKPTAYVRPMDGQDQAPSESPELKPLPEDYRQQTFEKTDLKVPAKAKLTKLKMPSQSVEQTYSNEVHCVEEILKEKPPPVNKQENAGTLNILSTLSNGNSSKQKIPADGVHR

SEQ ID NO: 70 - DNA, 596 bp, Homo sapiens
atctctttgccttccccagttccccctttgtcacctatacattccaaccagcaaactcttccccggacgcaaggaagcagcaaggttcatggcagcagcaataacagtaaaggctattgcccagccaaatctcccaaggacctagcagtgaaagtccatgataaagagacccctcaagacagtttggtggcccctgcccagccgccttctcagacatttccacctccctccctcccctcaaaaagtgttgcaatgcagcagaagcccacggcttatgtccggcccatggatggtcaagatcaggcccctagtgaatcccctgaactgaaaccactgccggaggactatcgacagcagacctttgaaaaaacagacttgaaagtgcctgccaaagccaagctcaccaaactgaagatgccttctcagtcagttgagcagacctactccaatgaagtccattgtgttgaagagattctgaaggaaaaaccacctccggtcaataagcaggagaatgcaggcactttgaacatcctcagcactctctccaatggcaatagttctaagcaaaaaattccagcagatggagtccacaggat

SEQ ID NO: 71 - protein, 198 aa, Homo sapiens; identical to SEQ ID NO: 69

SEQ ID NO: 72 - DNA, 596 bp, Homo sapiens; identical to SEQ ID NO: 70

SEQ ID NO: 73 - DNA, 747 bp, Homo sapiens
tccgtaagctcgacctcagtgagcctgggcagacctacatgacctaaatgtgttaggaaattgatagcagagtaaagttatctgtgtgcagaattccctgctgccatgggtggtgcctggagcagacgacttccaaaccgcttgtaagaaagcatgaagaataagtcacctgcacttcagaggccaaattttaaacctgaaaagatctaaatatagaagttttaaaatagtgacaggcaggttttttagagcagaagctgtaaaccagcagcctgagggctaggttgggcctgcagacaaattattttgtttggcctgtagggcttgttttctttctttctccctaccgccccccacacttttagccagtatttacaaactggagaatttaggaaaaaaatcattattggctgagtagaggcaatttctggaacctggccactgtattgcagcctaggcaacaaagcaagacccagtctcttttaaaaaaaaattcaaagattatttgtttatgttggaaacatgttttttagatctattaataaaatttgtcatttgcattattatctgttgcaaatgtgaaggcaaatagggtgtgattttgttctatattcatcttttgtctccttaggaaaaaccacctccggtcaataagcaggagaatgcaggcactttgaacatcctcagcactctctccaatggcaatagttctaagcaaaaaattccagcagatggagtccacaggat

SEQ ID NO: 74 - DNA, 2598 bp, Homo sapiens
ggatccgtggtcatcccgcctcagccacctactacaggaccgccaagaaaagaagttcccaaaaccactcctagtgagcccaagaaaaagcagcctccaccaccagaatcaggtgagtgaggagggcaagaaggaattgctgaaccacaagtactaacaaaaaagcactgatgtctcaaacagcatttgaaagcaggaaatgtatgatttgaagtcttcagttcaagaaaatcagctctctttctaactattatgtttaataataaagaaacagaaacaaaaaaaacagttaaattggaggtattgttttaatttcctgttcgaagcctagagtttaaatagtttttttttttttttctaatggccctttcttcacaggtcagtcagtactaaagtagtcgttgccagcatctgactgcaatttattctgaattttttaggtccagggcagagcaaacagaaaaaagtggctccccgcccaagtatccctgtaaaacaaaaaccaaaagaaaaggtgaggagagatttgtttctctgccatttctcagggatgtattctattttgtagggaaaagccttatccttgacttctatgtagatggcagtggaatttcttaaaattaagaaacttcaagtttaggcttttagctgggcacggtggctcatgctggtaatcccaacacttattgaggctgaggtgggaggattgcttgaggccagcagttcaagaccagcctgggcaacatagcaagaccctgtctttatttaaaccaaaaaaaaaaaaagaagaagaagaagaagttagccaggcatggtggcagttgcgtgtagtcccaggtactcaggaggctgagatagaaggattgtcttgagcccaggaattcaaggctgtagtgagctatgattgtaccactgcagtccagcctgggtgacaaagcaaaacactgtctccaaaaaaaatttaggcttggcaaggcgcagcggctcacgcctgtgatcccagcactttgggaagccgaagcaggcagatcacttgaggtcaggagttggagaccagcctggccaacatggtgaaaccctgtctctactgaaaatacaaaaattagccggttgtggtagtgggtgcttgtaatcctagctacttgggaggctgaggcaggggaattgcctgaacctgcgaggcggaggctgcagtgagccgagattgcatcattgcactctagcctggacaacagagctagactccatcccaaaaaaaaaaagtagccgggcacggtggctcacgcctgtaatcccagcactttgggaggccgaggcgggcggatcatgagggcaggagatcgagaccatcctggctaacacggtgaaaccctgtctctactaaaaatacaaaaaattagcccggcgaggtggcgggcgcctgtagtcccagctactcaggagagtgaggcaggagaatggcgtgaacccggggggcggagcctgcagtgagccgagatcgcgccactgcactccagcttgggtgacaccgagactccgtctcaaaaaaaaataaaaagtttaggctttagcctgtttcttttttggtttcttccttgttgcttttcccttctttgtggccccacatgttctagcctaggaatctgcttattctaaaggccatttggcgtaattattttttgaccccaacatcctttagcaattatttgtctgtaaaaatcacccttccctgtattcactatttttatttattatggataaagagatagtgtggtggctcacatctataatcccagcactttggggggccaaggcgggaggatcacttgagggcaggagctggagaccagcctgggcagcacagtgacacacagttgctataaaaaatttaaaaatcaactaggcatggtggcatgcacctgtagtcccagctactcttgagaagctgaggcaggaggatcacgagcccacaaggtctaggctgcagtgagctgtgactgtggcaatctttagagtttctctctctcacccgggctggaatgcagtagcacgatcacagctcacttcagccttgaactcctgggtccaagcaatgcccacttttccatcctgagtagctaggactgcaggcacatggcagcatgcttggctgatttatttttattttttgtagagacaaggtcttggggtgttgcccaggctgaacctggcaatcttatgaagaaacactttaaactctgaaggaaactttttaagtaatatagacacaatatttttgaaaagctcttaaattgctaaaaattaatgcaaagaatagaattgcttatagtagcccaagaggaaagcataaaattgaaactggaagaactttttgggtggtattaattggagttgtttttactttgtgcatttcactttctattccttctcggaaatgccagaagtacatttggtaccaggatgagaaattcctgttcctccttgttttcacacttgagatgtttgtggatggttattggatcggaagctggagtggtggcctgtttggattcaggcccaggggccgagacattcccttcttcactcttttccggatcc

SEQ ID NO: 75 - DNA, 60 bp, Homo sapiens
tctctgtgccagtagtgggcatgtagaggaccctaataggagtattcataccagcagcag

SEQ ID NO: 76 - DNA, 74 bp, Homo sapiens
atagctgggcacggtggctcacgcctgtaatcccgagagaatggtatcttttactcaagtaggtgagttggtgg

SEQ ID NO: 77 - DNA, 84 bp, Homo sapiens
ttccgctcccactagccccccagatgccacaaaatgttagtgcctcattatcagaggtaatttaatttcttccattctaaattt

SEQ ID NO: 78 - protein, 501 aa, Homo sapiens
MRIQPQKAAAIIDLDPDFEPQSRPRSCTWPLPRPEIANQPSEPPEVEPDLGEKVHTEGRSEPILLPSRLSEPAGGPQPGILGAVTGPRKGGSRRNAWGNQSYAEFISQAIESAPEKRLTLAQIYEWMVRTVPYFKDKGDSNSSAGWKNSIRHNLSLHSKFIKVHNEATGKSSWWMLNPEGGKSGKAPRRRAASMDSSSKLLRGRSKAPKKKPSVLPAPPEGATPTSPVGHFAKWSGSPCSRNREEADMWTTFRPRSSSNASSVSTRLSPLRPESEVLAEEIPASVSSYAGGVPPTLNEGLELLDGLNLTSSHSLLSRSGLSGFSLQHPGVTGPLHTYSSSLFSPAEGPLSAGEGCFSSSQALEALLTSDTPPPPADVLMTQVDPILSQAPTLLLLGGLPSSSKLATGVGLCPKPLEARGPSSLVPTLSMIAPPPVMASAPIPKALGTPVLTPPTEAASQDRMPQDLDLDMYMENLECDMDNIISDLMDEGEGLDFNFEPDP

SEQ ID NO: 79 - DNA, 3171 bp, Homo sapiens
gggacagcttagggactatcgtcctgggactagggggaagttcgcgactttctgaagactggcaggaatgtgcctcctggccctcgatgcttcccccctgaggggaggcatcgtgagggactgtggcaggcttcactgaacgctgagccggggaggtccaactccacgtatggatccggggaatgagaattcagccacagaaggccgccgcgatcatagacctagatcccgacttcgaaccccagagccgtccccgctcctgcacctggccccttccccgaccagagatcgctaaccagccgtccgagccgcccgaggtggagccagatctgggggaaaaggtacacacggaggggcgctcagagccgatcctgttgccctctcggctctcagagccggccgggggcccccagcccggaatcctgggggctgtaacaggtcctcggaagggaggctcccgccggaatgcctggggaaatcagtcatatgcagaattcatcagccaggccattgaaagcgccccggagaagcgactgacacttgcccagatttacgagtggatggtccgtactgtaccctacttcaaggacaagggtgacagcaacagctcagcaggatggaagaactcgatccgccacaacctgtccctgcacagcaagttcatcaaggttcacaacgaggccaccggcaaaagctcttggtggatgctgaaccctgagggaggcaagagcggcaaagccccccgccgccgggccgcctccatggatagcagcagcaagctgctccggggccgcagtaaagcccccaagaagaaaccatctgtgctgccagctccacccgaaggtgccactccaacgagccctgtcggccactttgccaagtggtcaggcagcccttgctctcgaaaccgtgaagaagccgatatgtggaccaccttccgtccacgaagcagttcaaatgccagcagtgtcagcacccggctgtcccccttgaggccagagtctgaggtgctggcggaggaaataccagcttcagtcagcagttatgcagggggtgtccctcccaccctcaatgaaggtctagagctgttagatgggctcaatctcacctcttcccattccctgctatctcggagtggtctctctggcttctctttgcagcatcctggggttaccggccccttacacacctacagcagctcccttttcagcccagcagaggggcccctgtcagcaggagaagggtgcttctccagctcccaggctctggaggccctgctcacctctgatacgccaccaccccctgctgacgtcctcatgacccaggtagatcccattctgtcccaggctccgactcttctgttgctgggggggcttccttcctccagtaagctggccacgggcgtcggcctgtgtcccaagcccctagaggctcgaggccccagcagtctggttcccaccctttctatgatagcaccacctccagtcatggcaagtgcccccatccccaaggctctggggactcctgtgctcacaccccctactgaagctgcaagccaagacagaatgcctcaggatctagatcttgatatgtatatggagaacctggagtgtgacatggataacatcatcagtgacctcatggatgagggcgagggactggacttcaactttgagccagatccctgagtcatgcctggaagctttgtcccctgcttcagatgtggagccaggcgtgttcatatctactctttacccttgagccctccccaggaatttgggaccctgctttagagctagggtggggtctggtcacacacaggtgttgaagaaattataaagataaagctgccccatctggggacgatatggggagggagatgggaggggaaaggggagagggtttttctcactgtgccaattagggggtaaggccccctctcaggagccatcatcggctttccccattcctacccacttaggctttgtagcaagatgagcaatgctgttggaaatgtgaagtcaccagtggccttacccctgcctttgggagcaggatttttttgtagagagtcttatctgagctgagccaggctagctggagcctgggatttctatgcagtggccccttaggccagtgatgtgcggtgggtgggctgtttaggggatctggaagggccaaggtctgagcactggagtggctcgccaggccaaatcacccttagaaggctgcagataacagaaaggctttttataaacttttaaagaaatataaacacaaatatagagattttttaaccatggcagggtgctagtggtgggcagaatgcttttttttctttctgaaggctttgtgatagtgacatgatacaaacactacagacaataaatattaggagacacagggaagtggggagaggtggggagtaatagtaaacacagggaagagctcccctacggaccaggtatagagaaaggtctatgcagaaataggttagagtttccctaacaaaaaagctaacccaggtcccctcattccttcaacttgtgcctgggagtgtgtggtgttagggtgcagccacactcttctatgacccagcatgggttagtgctatggtgggagagtacattgaaggcctggaattagcttggggccagggaagggactgggaggggagagaagagaaggagggaaggatttaggatggtaaagttaggtacagagacctccctgttcaaggcccctgacagctgtccctgcccttcttccccttccctgactgcaggggttatgtggaagtgtgtgtggcagcaggcagcggggaggggaggaacagggaagggggagctggggagcttggctgagggtctgggaaatgagcagggatggggggggatgtggatcaggtttactagcacctgccagggaggccatctggggctccttctccaccccagcccccaaagcagcccttcccccagtgccctttgcatcgtcccctcccccacccctgctgtgggttcccatcatttcctgtgtcagcgcctggcctacccagattgtatcatgtgctagattggagtggggaagtgtgtcaaatcaataaatgaataaattcaataaatgcctataaccagcagaaaaaaaaaaaaaaaaaaaaaaaaaaaaaaa

SEQ ID NO: 80 - protein, 501 aa, Homo sapiens; identical to SEQ ID NO: 78

SEQ ID NO: 81 - DNA, 3171 bp, Homo sapiens; identical to SEQ ID NO: 79

SEQ ID NO: 82 - DNA, 74 bp, Homo sapiens
ggagtccacaggatcagagtggactttaagcatgataccagtagtcctttgctaatcagtggaacctctgcaga

SEQ ID NO: 83 - protein, 22 aa, Homo sapiens
KQPPPPESGFGVPWSDEILFSR

SEQ ID NO: 84 - DNA, 69 bp, Homo sapiens
aagcagcctccaccaccagaatcaggatttggagttccatggagtgatgagattttattttcaagataa

SEQ ID NO: 85 - protein, 23 aa, Homo sapiens
VKQKPKEKDLEFHGVMRFYFQDK

SEQ ID NO: 86 - DNA, 69 bp, Homo sapiens
gtaaaacaaaaaccaaaagaaaaggatttggagttccatggagtgatgagattttattttcaagataaa

SEQ ID NO: 87 - protein, 23 aa, Homo sapiens
HRIRVDFKDLEFHGVMRFYFQDK

SEQ ID NO: 88 - DNA, 69 bp, Homo sapiens
cacaggatcagagtggactttaaggatttggagttccatggagtgatgagattttattttcaagataaa

SEQ ID NO: 89 - protein, 76 aa, Homo sapiens
PPTTGPPRKEVPKTTPSEPKKKQPPPPESGIYTSNKDPISHSGGMLRAVCSTPLSSSLLGPPGTSALPRLSRSPFT

SEQ ID NO: 90 - DNA, 228 bp, Homo sapiens
ccacctactacaggaccgccaagaaaagaagttcccaaaaccactcctagtgagcccaagaaaaagcagcctccaccaccagaatcaggcatctacaccagtaataaggaccccatctcccacagtggcgggatgctgcgggctgtctgcagcacccctctctcctccagcctcctggggcccccagggacctcggccctgccccgcctcagccgctccccgttcacc

SEQ ID NO: 91 - protein, 1093 aa, Homo sapiens
MKEMVGGCCVCSDERGWAENPLVYCDGHACSVAVHQACYGIVQVPTGPWFCRKCESQERAARVRCELCPHKDGALKRTDNGGWAHVVCALYIPEVQFANVLTMEPIVLQYVPHDRFNKTCYICEETGRESKAASGACMTCNRHGCRQAFHVTCAQMAGLLCEEEVLEVDNVKYCGYCKYHFSKMKTSRHSSGGGGGGAGGGGGSMGGGGSGFISGRRSRSASPSTQQEKHPTHHERGQKKSRKDKERLKQKHKKRPESPPSILTPPVVPTADKVSSSASSSSHHEASTQETSESSRESKGKKSSSHSLSHKGKKLSSGKGVSSFTSASSSSSSSSSSSGGPFQPAVSSLQSSPDFSAFPKLEQPEEDKYSKPTAPAPSAPPSPSAPEPPKADLFEQKVVFSGFGPIMRFSTTTSSSGRARAPSPGDYKSPHVTGSGASAGTHKRMPALSATPVPADETPETGLKEKKHKASKRSRHGPGRPKGSRNKEGTGGPAAPSLPSAQLAGFTATAASPFSGGSLVSSGLGGLSSRTFGPSGSLPSLSLESPLLGAGIYTSNKDPISHSGGMLRAVCSTPLSSSLLGPPGTSALPRLSRSPFTSTLPSSSASISTTQVFSLAGSTFSLPSTHIFGTPMGAVNPLLSQAESSHTEPDLEDCSFRCRGTSPQESLSSMSPISSLPALFDQTASAPCGGGQLDPAAPGTTNMEQLLEKQGDGEAGVNIVEMLKALHALQKENQRLQEQILSLTAKKERLQILNVQLSVPFPALPAALPAANGPVPGPYGLPPQAGSSDSLSTSKSPPGKSSLGLDNSLSTSSEDPHSGCPSRSSSSLSFHSTPPPLPLLQQSPATLPLALPGAPAPLPPQPQNGLGRAPGAAGLGAMPMAEGLLGGLAGSGGLPLNGLLGGLNGAAAPNPASLSQAGGAPTLQLPGCLNSLTEQQRHLLQQQEQQLQQLQQLLASPQLTPEHQTVVYQMIQQIQQKRELQRLQMAGGSQLPMASLLAGSSTPLLSAGTPGLLPTASAPPLLPAGALVAPSLGNNTSLMAAAAAAAAVAAAGGPPVLTAQTNPFLSLSGAEGSGGGPKGGTADKGASANQEKG

SEQ ID NO: 92 - DNA, 3282 bp, Homo sapiens
atgaaggagatggtaggaggctgctgcgtatgttcggacgagaggggctgggccgagaacccgctggtctactgcgatgggcacgcgtgcagcgtggccgtccaccaagcttgctatggcatcgttcaggtgccaacgggaccctggttctgccggaaatgtgaatctcaggagcgagcagccagggtgaggtgtgagctgtgcccacacaaagacggggcattgaagaggactgataatggaggctgggcacacgtggtgtgtgccctctacatccccgaggtgcaatttgccaacgtgctcaccatggagcccatcgtgctgcagtacgtgcctcatgatcgcttcaacaagacctgttacatctgcgaggagacgggccgggagagcaaggcggcctcgggagcctgcatgacctgtaaccgccatggatgtcgacaagctttccacgtcacctgtgcccaaatggcaggcttgctgtgtgaggaagaagtgctggaggtggacaacgtcaagtactgcggctactgcaaataccacttcagcaagatgaagacatcccggcacagcagcgggggaggcggaggaggcgctggaggaggaggtggcagcatggggggaggtggcagtggtttcatctctgggaggagaagccggtcagcctcaccatccacgcagcaggagaagcaccccacccaccacgagaggggccagaagaagagtcgaaaggacaaagaacgccttaagcagaagcacaagaagcggcctgagtcgccccccagcatcctcaccccgcccgtggtccccactgctgacaaggtctcctcctcggcttcctcttcctcccaccacgaggccagcacgcaggagacctctgagagcagcagggagtcaaaggggaaaaagtcttccagccatagcctgagtcataaagggaagaaactgagcagtgggaaaggtgtgagcagttttacctccgcctcctcttcttcctcctcctcttcctcctcctctggggggcccttccagcctgcagtctcgtccctgcagagctcccctgacttctctgcattccccaagctggagcagccagaggaggacaagtactccaagcccacagcccccgccccttcagcccctccttctccctcagctcccgagccccccaaggctgacctttttgagcagaaggtggtcttctctggctttgggcccatcatgcgcttctccaccaccacctccagctcaggccgggcccgggcgccctcccctggggactataagtctccccacgtcacggggtctggggcctcggcaggcacccacaaacggatgcccgcactgagtgccacccctgtgcctgctgatgagacccctgagacaggcctgaaggagaagaagcacaaagccagcaagaggagccgccatgggccaggccgtcccaagggcagccggaacaaggagggcactgggggcccagctgccccatccttgcccagtgcccagctggctggctttaccgccactgctgcctcacccttctctggaggttccctggtcagctccggcctgggaggtctgtcctcccgaacctttgggccttctgggagcttgcccagcttgagcctggagtcccccttactaggggcaggcatctacaccagtaataaggaccccatctcccacagtggcgggatgctgcgggctgtctgcagcacccctctctcctccagcctcctggggcccccagggacctcggccctgccccgcctcagccgctccccgttcaccagcaccctcccctcctcttctgcttctatctccaccactcaggtgttttctctggctggctctacctttagcctcccttctacccacatctttggaacccccatgggtgccgttaatcccctcctctcccaagctgagagcagccacacagagccagacctggaggactgcagcttccggtgtcgggggacctcccctcaggagagtctgtcttccatgtcccccatcagcagcctccccgcactcttcgaccagacagcctctgcaccctgtgggggcggccagttagacccggcggccccagggacgactaacatggagcagcttctggagaagcagggcgacggggaggccggcgtcaacatcgtggagatgctgaaggcgctgcacgcgctgcagaaggagaaccagcggctgcaagagcagatcctgagcctgacggccaaaaaggagcggctgcagattctcaacgtgcagctctctgtgcccttccctgccctgcctgctgccctgcctgccgccaacggccctgtccctgggccctatggcctgcctccccaagccgggagcagcgactccttgagcaccagcaagagccctccgggaaagagcagcctcggcctggacaactcgctgtccacttcttctgaggacccacactcaggctgcccgagccgcagcagctcgtcgctgtccttccacagcacgcccccaccgctgcccctcctccagcagagccctgccactctgcccctggccctgcctggggcccctgccccactcccgccccagccgcagaacgggttgggccgggcacccggggcagcggggctgggggccatgcccatggctgaggggctgttgggggggctggcaggcagtgggggcctgcccctcaatgggctccttggggggttgaatggggccgctgcccccaaccccgcaagcttgagccaggctggcggggcccccacgctgcagctgccaggctgtctcaacagccttacagagcagcagagacatctccttcagcagcaagagcagcagctccagcaactccagcagctcctggcctccccgcagctgaccccggaacaccagactgttgtctaccagatgatccagcagatccagcagaaacgggagctgcagcgtctgcagatggctgggggctcccagctgcccatggccagcctgctggcaggaagctccaccccgctgctgtctgcgggtacccctggcctgctgcccacagcgtctgctccacccctgctgcccgctggagccctagtggctccctcgcttggcaacaacacaagtctcatggccgcagcagctgcagctgcagcagtagcagcagcaggcggacctccagtcctcactgcccagaccaaccccttcctcagcctgtcgggagcagagggcagtggcggtggccccaaaggagggaccgctgacaaaggagcctcagccaaccaggaaaaaggctaa

SEQ ID NO: 93 - protein, 752 aa, Homo sapiens
MRIPVDASTSRRFTPPSTALSPGKMSEALPLGAPDAGAALAGKLRSGDRSMVEVLADHPGELVRTDSPNFLCSVLPTHWRCNKTLPIAFKVVALGDVPDGTLVTVMAGNDENYSAELRNATAAMKNQVARFNDLRFVGRSGRGKSFTLTITVFTNPPQVATYHRAIKITVDGPREPRNRTEKHSTMPDSPVDVKTQSRLTPPTMPPPPTTQGAPRTSSFTPTTLTNGTSHSPTALNGAPSPPNGFSNGPSSSSSSSLANQQLPPACGARQLSKLKRFLTTLQQFGNDISPEIGERVRTLVLGLVNSTLTIEEFHSKLQEATNFPLRPFVIPFLKANLPLLQRELLHCARLAKQNPAQYLAQHEQLLLDASTTSPVDSSELLLDVNENGKRRTPDRTKENGFDREPLHSEHPSKRPCTISPGQRYSPNNGLSYQPNGLPHPTPPPPQHYRLDDMAIAHHYRDSYRHPSHRDLRDRNRPMGLHGTRQEEMIDHRLTDREWAEEWKHLDHLLNCIMDMVEKTRRSLTVLRRCQEADREELNYWIRRYSDAEDLKKGGGSSSSHSRQQSPVNPDPVALDAHREFLHRPASGYVPEEIWKKAEEAVNEVKRQAMTELQKAVSEAERKAHDMITTERAKMERTVAEAKRQAAEDALAVINQQEDSSESCWNCGRKASETCSGCNTARYCGSFCQHKDWEKHHHICGQTLQAQQQGDTPAVSSSVTPNSGAGSPMDTPPAATPRSTTPGTPSTIETTPR

SEQ ID NO: 94 - DNA, 4272 bp, Homo sapiens
catagagccagcgggcgcgggcgggacgggcgccccgcggccggacccagccagggcaccacgctgcccggccctgcgccgccaggcacttctttccggggctcctagggacgccagaaggaagtcaacctctgctgcttctccttggcctgcgttggaccttcctttttttgttgtttttttttgtttttcccctttcttccttttgaattaactggcttcttggctggatgttttcaacttctttcctggctgcgaacttttccccaattgttttccttttacaacagggggagaaagtgctctgtggtccgaggcgagccgtgaagttgcgtgtgcgtggcagtgtgcgtggcaggatgtgcgtgcgtgtgtaacccgagccgcccgatctgtttcgatctgcgccgcggagccctccctcaaggcccgctccacctgctgcggttacgcggcgctcgtgggtgttcgtgcctcggagcagctaaccggcgggtgctgggcgacggtggaggagtatcgtctcgctgctgcccgagtcagggctgagtcacccagctgatgtagacagtggctgccttccgaagagtgcgtgtttgcatgtgtgtgactctgcggctgctcaactcccaacaaaccagaggaccagccacaaacttaaccaacatccccaaacccgagttcacagatgtgggagagctgtagaaccctgagtgtcatcgactgggccttcttatgattgttgttttaagattagctgaagatctctgaaacgctgaattttctgcactgagcgttttgacagaattcattgagagaacagagaacatgacaagtacttctagctcagcactgctccaactactgaagctgattttcaaggctacttaaaaaaatctgcagcgtacattaatggatttctgttgtgtttaaattctccacagattgtattgtaaatattttatgaagtagagcatatgtatatatttatatatacgtgcacatacattagtagcactacctttggaagtctcagctcttgcttttcgggactgaagccagttttgcatgataaaagtggccttgttacgggagataattgtgttctgttgggactttagacaaaactcacctgcaaaaaactgacaggcattaactactggaacttccaaataatgtgtttgctgatcgttttactcttcgcataaatattttaggaagtgtatgagaattttgccttcaggaacttttctaacagccaaagacagaacttaacctctgcaagcaagattcgtggaagatagtctccactttttaatgcactaagcaatcggttgctaggagcccatcctgggtcagaggccgatccgcagaaccagaacgttttcccctcctggactgttagtaacttagtctccctcctcccctaaccacccccgcccccccccaccccccgcagtaataaaggcccctgaacgtgtatgttggtctcccgggagctgcttgctgaagatccgcgcccctgtcgccgtctggtaggagctgtttgcagggtcctaactcaatcggcttgttgtgatgcgtatccccgtagatgccagcacgagccgccgcttcacgccgccttccaccgcgctgagcccaggcaagatgagcgaggcgttgccgctgggcgccccggacgccggcgctgccctggccggcaagctgaggagcggcgaccgcagcatggtggaggtgctggccgaccacccgggcgagctggtgcgcaccgacagccccaacttcctctgctccgtgctgcctacgcactggcgctgcaacaagaccctgcccatcgctttcaaggtggtggccctaggggatgttccagatggcactctggtcactgtgatggctggcaatgatgaaaactactcggctgagctgagaaatgctaccgcagccatgaagaaccaggttgcaagatttaatgacctcaggtttgtcggtcgaagtggaagagggaaaagcttcactctgaccatcactgtcttcacaaacccaccgcaagtcgccacctaccacagagccatcaaaatcacagtggatgggccccgagaacctcgaaatcgtactgagaagcactccacaatgccagactcacctgtggatgtgaagacgcaatctaggctgactcctccaacaatgccacctcccccaactactcaaggagctccaagaaccagttcatttacaccgacaacgttaactaatggcacgagccattctcctacagccttgaatggcgccccctcaccacccaatggcttcagcaatgggccttcctcttcttcctcctcctctctggctaatcaacagctgcccccagcctgtggtgccaggcaactcagcaagctgaaaaggttccttactaccctgcagcagtttggcaatgacatttcacccgagataggagaaagagttcgcaccctcgttctgggactagtgaactccactttgacaattgaagaatttcattccaaactgcaagaagctactaacttcccactgagaccttttgtcatcccatttttgaaggccaacttgcccctgctgcagcgtgagctcctccactgcgcaagactggccaaacagaaccctgcccagtacctcgcccagcatgaacagctgcttctggatgccagcaccacctcacctgttgactcctcagagctgcttctcgatgtgaacgaaaacgggaagaggcgaactccagacagaaccaaagaaaatggctttgacagagagcctttgcactcagaacatccaagcaagcgaccatgcactattagcccaggccagcggtacagtccaaataacggcttatcctaccagcccaatggcctgcctcaccctaccccacctccacctcagcattaccgtttggatgatatggccattgcccaccactacagggactcctatcgacaccccagccacagggacctcagggacagaaacagacctatggggttgcatggcacacgtcaagaagaaatgattgatcacagactaacagacagagaatgggcagaagagtggaaacatcttgaccatctgttaaactgcataatggacatggtagaaaaaacaaggcgatctctcaccgtactaaggcggtgtcaagaagcagaccgggaagaattgaattactggatccggcggtacagtgacgccgaggacttaaaaaaaggtggcggcagtagcagcagccactctaggcagcagagtcccgtcaacccagacccagttgcactagacgcgcatcgggaattccttcacaggcctgcgtctggatacgtgccagaggagatctggaagaaagctgaggaggccgtcaatgaggtgaagcgccaggcgatgacggagctgcagaaggccgtgtctgaggcggagcggaaagcccacgacatgatcacaacagagagggccaagatggagcgcacggtcgccgaggccaaacggcaggcggcggaggacgcactggcagttatcaatcagcaggaggattcaagcgagagttgctggaattgtggccgtaaagcgagtgaaacctgcagtggctgtaacacagcccgatactgtggctcattttgccagcacaaagactgggagaagcaccatcacatctgtggacagaccctgcaggcccagcagcagggagacacacctgcagtcagctcctctgtcacgcccaacagcggggctgggagcccgatggacacaccaccagcagccactccgaggtcaaccaccccgggaaccccttccaccatagagacaacccctcgctagacgtgaactcagaactgtcggaggaaagacaacacaaccaacgcgaaaccaattcctcatcctcagatgctcaaagttgttttttttgtttgtttgtttattagatgaattatcctatttcagtacttcagcaagagagaacctaactgtatcttgaggtggtagtaaaacacagagggccagtaacgggtcgtaatgacttattgtggataacaaagatatcttttctttagagaactgaaaagagagcagagaatataacatgaaatgatagatttgacctcctccctgttattttcaagtagctgggattttaaactagatgacctcattaaccgatgctttaccaaacagcaaaccaagagattgctaattgctgttgaaagcaaaaatgctaatattaaaagtcacaatgttctttatatacaataatgg

SEQ ID NO: 95 - protein, 588 aa, Homo sapiens
AIKITVDGPREPRNRTEKHSTMPDSPVDVKTQSRLTPPTMPPPPTTQGAPRTSSFTPTTLTNGTSHSPTALNGAPSPPNGFSNGPSSSSSSSLANQQLPPACGARQLSKLKRFLTTLQQFGNDISPEIGERVRTLVLGLVNSTLTIEEFHSKLQEATNFPLRPFVIPFLKANLPLLQRELLHCARLAKQNPAQYLAQHEQLLLDASTTSPVDSSELLLDVNENGKRRTPDRTKENGFDREPLHSEHPSKRPCTISPGQRYSPNNGLSYQPNGLPHPTPPPPQHYRLDDMAIAHHYRDSYRHPSHRDLRDRNRPMGLHGTRQEEMIDHRLTDREWAEEWKHLDHLLNCIMDMVEKTRRSLTVLRRCQEADREELNYWIRRYSDAEDLKKGGGSSSSHSRQQSPVNPDPVALDAHREFLHRPASGYVPEEIWKKAEEAVNEVKRQAMTELQKAVSEAERKAHDMITTERAKMERTVAEAKRQAAEDALAVINQQEDSSESCWNCGRKASETCSGCNTARYCGSFCQHKDWEKHHHICGQTLQAQQQGDTPAVSSSVTPNSGAGSPMDTPPAATPRSTTPGTPSTIETTPR

SEQ ID NO: 96 - DNA, 2217 bp, Homo sapiens
gccatcaaaatcacagtggatgggccccgagaacctcgaaatcgtactgagaagcactccacaatgccagactcacctgtggatgtgaagacgcaatctaggctgactcctccaacaatgccacctcccccaactactcaaggagctccaagaaccagttcatttacaccgacaacgttaactaatggcacgagccattctcctacagccttgaatggcgccccctcaccacccaatggcttcagcaatgggccttcctcttcttcctcctcctctctggctaatcaacagctgcccccagcctgtggtgccaggcaactcagcaagctgaaaaggttccttactaccctgcagcagtttggcaatgacatttcacccgagataggagaaagagttcgcaccctcgttctgggactagtgaactccactttgacaattgaagaatttcattccaaactgcaagaagctactaacttcccactgagaccttttgtcatcccatttttgaaggccaacttgcccctgctgcagcgtgagctcctccactgcgcaagactggccaaacagaaccctgcccagtacctcgcccagcatgaacagctgcttctggatgccagcaccacctcacctgttgactcctcagagctgcttctcgatgtgaacgaaaacgggaagaggcgaactccagacagaaccaaagaaaatggctttgacagagagcctttgcactcagaacatccaagcaagcgaccatgcactattagcccaggccagcggtacagtccaaataacggcttatcctaccagcccaatggcctgcctcaccctaccccacctccacctcagcattaccgtttggatgatatggccattgcccaccactacagggactcctatcgacaccccagccacagggacctcagggacagaaacagacctatggggttgcatggcacacgtcaagaagaaatgattgatcacagactaacagacagagaatgggcagaagagtggaaacatcttgaccatctgttaaactgcataatggacatggtagaaaaaacaaggcgatctctcaccgtactaaggcggtgtcaagaagcagaccgggaagaattgaattactggatccggcggtacagtgacgccgaggacttaaaaaaaggtggcggcagtagcagcagccactctaggcagcagagtcccgtcaacccagacccagttgcactagacgcgcatcgggaattccttcacaggcctgcgtctggatacgtgccagaggagatctggaagaaagctgaggaggccgtcaatgaggtgaagcgccaggcgatgacggagctgcagaaggccgtgtctgaggcggagcggaaagcccacgacatgatcacaacagagagggccaagatggagcgcacggtcgccgaggccaaacggcaggcggcggaggacgcactggcagttatcaatcagcaggaggattcaagcgagagttgctggaattgtggccgtaaagcgagtgaaacctgcagtggctgtaacacagcccgatactgtggctcattttgccagcacaaagactgggagaagcaccatcacatctgtggacagaccctgcaggcccagcagcagggagacacacctgcagtcagctcctctgtcacgcccaacagcggggctgggagcccgatggacacaccaccagcagccactccgaggtcaaccaccccgggaaccccttccaccatagagacaacccctcgctagacgtgaactcagaactgtcggaggaaagacaacacaaccaacgcgaaaccaattcctcatcctcagatgctcaaagttgttttttttgtttgtttgtttattagatgaattatcctatttcagtacttcagcaagagagaacctaactgtatcttgaggtggtagtaaaacacagagggccagtaacgggtcataatgacttattgtggataacaaagatatcttttctttagagaactgaaaagagagcagagaatataacatgaaatgatagatttgacctcctccctgaaattttcaagtagctgggattttaaactagatgacctcattaaccgatgctttaccaaacaccaaaccaagagattgctaattgctgttgaaagcaaaaatgctaatattaaaagtcacaatgttctttatatacaataatggaaaaaaaaaaaaaaa

SEQ ID NO: 97 - protein, 231 aa, Homo sapiens
AIKITVDGPREPRNRTEKHSTMPDSPVDVKTQSRLTPPTMPPPPTTQGAPRTSSFTPTTLTNGTSHSPTALNGAPSPPNGFSNGPSSSSSSSLANQQLPPACGARQLSKLKRFLTTLQQFGNDISPEIGERVRTLVLGLVNSTLTIEEFHSKLQEATNFPLRPFVIPFLKANLPLLQRELLHCARLAKQNPAQYLAQHEQLLLDASTTSPVDSSELLLDVNENGKRRTPDR

SEQ ID NO: 98 - DNA, 1412 bp, Homo sapiens
gccatcaaaatcacagtggatgggccccgagaacctcgaaatcgtactgagaagcactccacaatgccagactcacctgtggatgtgaagacgcaatctaggctgactcctccaacaatgccacctcccccaactactcaaggagctccaagaaccagttcatttacaccgacaacgttaactaatggcacgagccattctcctacagccttgaatggcgccccctcaccacccaatggcttcagcaatgggccttcctcttcttcctcctcctctctggctaatcaacagctgcccccagcctgtggtgccaggcaactcagcaagctgaaaaggttccttactaccctgcagcagtttggcaatgacatttcacccgagataggagaaagagttcgcaccctcgttctgggactagtgaactccactttgacaattgaagaatttcattccaaactgcaagaagctactaacttcccactgagaccttttgtcatcccatttttgaaggccaacttgcccctgctgcagcgtgagctcctccactgcgcaagactggccaaacagaaccctgcccagtacctcgcccagcatgaacagctgcttctggatgccagcaccacctcacctgttgactcctcagagctgcttctcgatgtgaacgaaaacgggaagaggcgaactccagacaggtgagagggaggaggagcctggatgaaccatgacctttttcccatacctgtggcatgaggaaacatttcatgtcacaattaaaccgctggcctatgtcattcttgcacaatagcaataagccattgtggccatcttgagaatctggctctggcctgggattttacagagttttgaatctctggcctgggacagtttggcttttgtgtaggttaatcttttctgcttgtagtattaaagcgaaatggtgaagacgaatgatttttctgatttgccaagtaccactgatggctcttagatgcacatcaatattaaaattctcattcattatgtaatttaacccaaccacatattttacttcaatattctgaaattggctgttcctagtttccttaaaatgtgatggtttggaagcttgtctgtatgtatttcttaacacagtacagtagttatttgttttggttgtatatgaactaagagaaaacttctgggacactagatgaactgagtgaagataagagttatacagtagagacaatagatggtatttttgctgaaaattttacttgttagatactgttctatcagatactgtgctctcataactaagaattctaagaaatgtaaaataaaaccacttctccattaaaccctacagagtaattgttgaataaagcatacacatgaaatttcaaaaaaaaaaaaaaaaaaagggcggccgc

SEQ ID NO: 99 - protein, 198 aa, Homo sapiens
SFTLTITVFTNPPQVATYHRAIKITVDGPREPRNRTEKHSTMPDSPVDVKTQSRLTPPTMPPPPTTQGAPRTSSFTPTTLTNGTSHSPTALNGAPSPPNGFSNGPSSSSSSSLANQQLPPACGARQLSKLKRFLTTLQQFGNDISPEIGERVRTLVLGLVNSTLTIEEFHSKLQEATNFPLRPFVIPFLKVLHSSLVV

SEQ ID NO: 100 - DNA, 799 bp, Homo sapiens
aagcttcactctgaccatcactgtcttcacaaacccaccgcaagtcgccacctaccacagagccatcaaaatcacagtggatgggccccgagaacctcgaaatcgtactgagaagcactccacaatgccagactcacctgtggatgtgaagacgcaatctaggctgactcctccaacaatgccacctcccccaactactcaaggagctccaagaaccagttcatttacaccgacaacgttaactaatggcacgagccattctcctacagccttgaatggcgccccctcaccacccaatggcttcagcaatgggccttcctcttcttcctcctcctctctggctaatcaacagctgcccccagcctgtggtgccaggcaactcagcaagctgaaaaggttccttactaccctgcagcagtttggcaatgacatttcacccgagataggagaaagagttcgcaccctcgttctgggactagtgaactccactttgacaattgaagaatttcattccaaactgcaagaagctactaacttcccactgagaccttttgtcatcccatttttgaaggtattgcacagttcactggtcgtgtaaagtattttaaaccatattgttgctaggtcataactgtgtgcttttttagtacatttaggggctctttgatttaatttaatggatgaaaactatctgaatcgattgtatttatgaccatttcctaagtagtctgaaaattacaaggagtgttttaaataattacctgaaaagaagtaaagtttgaagaagagtttagaagtc

SEQ ID NO: 101 - DNA, 237 bp, Homo sapiens
gccccgagaacctcgaaatcgtactgagaagcactccacaatgccagactcacctgtggatgtgaagacgcaatctaggctgactcctccaacaatgccacctcccccaactactcaaggagctccaagaaccagttcatttacaccgacaacgttaactaatggcacgagccattctcctacagccttgaatggcgccccctcaccacccaatggcttcagcaatgggccttcctc

SEQ ID NO: 102 - DNA, 276 bp, Homo sapiens
gaagtggaagagggaaaagcttcactctgaccatcactgtcttcacaaacccaccgcaagtcgccacctaccacagagccatcaaaatcacagtggatgggccccgagaacctcgaaataaaccccacttgaaaaactgaggtgcttaaggagtaaaataatatgttcctggtggcatcctccagatcgtactgagaagcactccacaatgccagactcacctgtggatgtgaagacgcaatctaggctgactcctccaacaatgccacctccccc

SEQ ID NO: 103 - protein, 251 aa, Homo sapiens
SFTLTITVFTNPPQVATYHRAIKITVDGPREPRNRTEKHSTMPDSPVDVKTQSRLTPPTMPPPPTTQGAPRTSSFTPTTLTNGTSHSPTALNGAPSPPNGFSNGPSSSSSSSLANQQLPPACGARQLSKLKRFLTTLQQFGNDISPEIGERVRTLVLGLVNSTLTIEEFHSKLQEATNFPLRPFVIPFLKANLPLLQRELLHCARLAKQNPAQYLAQHEQLLLDASTTSPVDSSELLLDVNENGKRRTPDR

SEQ ID NO: 104 - DNA, 1446 bp, Homo sapiens
aagcttcactctgaccatcactgtcttcacaaacccaccgcaagtcgccacctaccacagagccatcaaaatcacagtggatgggccccgagaacctcgaaatcgtactgagaagcactccacaatgccagactcacctgtggatgtgaagacgcaatctaggctgactcctccaacaatgccacctcccccaactactcaaggagctccaagaaccagttcatttacaccgacaacgttaactaatggcacgagccattctcctacagccttgaatggcgccccctcaccacccaatggcttcagcaatgggccttcctcttcttcctcctcctctctggctaatcaacagctgcccccagcctgtggtgccaggcaactcagcaagctgaaaaggttccttactaccctgcagcagtttggcaatgacatttcacccgagataggagaaagagttcgcaccctcgttctgggactagtgaactccactttgacaattgaagaatttcattccaaactgcaagaagctactaacttcccactgagaccttttgtcatcccatttttgaaggccaacttgcccctgctgcagcgtgagctcctccactgcgcaagactggccaaacagaaccctgcccagtacctcgcccagcatgaacagctgcttctggatgccagcaccacctcacctgttgactcctcagagctgcttctcgatgtgaacgaaaacgggaagaggcgaactccagacaggtgagagggaggaggagcctggatgaaccatgacctttttcccatacctgtggcatgaggaaacatttcatgtcacaattaaaccgctggcctatgtcattcttgcacaatagcaataagccattgtggccatcttgagaatctggctctggcctgggattttacagagttttgaatctctggcctgggacagtttggcttttgtgtaggttaatcttttctgcttgtagtattaaagcgaaatggtgaagacgaatgatttttctgatttgccaagtaccactgatggctcttagatgcacatcaatattaaaattctcattcattatgtaatttaacccaaccacatattttacttcaatattctgaaattggctgttcctagtttccttaaaatgtgatggtttggaagcttgtctgtatgtatttcttaacacagtacagtagttatttgttttggttgtatatgaactaagagaaaacttctgggacactagatgaactgagtgaagataagagttatacagtagagacaatagatggtatttttgctgaaaattttacttgttagatactgttctatcagatactgtgctctcataactaagaattctaagaaatgtaaaataaaaccacttctccattaaaccctacagagtaattgttgaataaagcatacacatgaaatttccc

SEQ ID NO: 105 - protein, 1395 aa, Homo sapiens
MRIPVDASTSRRFTPPSTALSPGKMSEALPLGAPDAGAALAGKLRSGDRSMVEVLADHPGELVRTDSPNFLCSVLPTHWRCNKTLPIAFKVVALGDVPDGTLVTVMAGNDENYSAELRNATAAMKNQVARFNDLRFVGRSGRGKSFTLTITVFTNPPQVATYHRAIKITVDGPREPRNNECVYGNYPEIPLEEMPDADGVASTPSLNIQEPCSPATSSEAFTPKEGSPYKAPIYIPDDIPIPAEFELRESNMPGAGLGIWTKRKIEVGEKFGPYVGEQRSNLKDPSYGWEILDEFYNVKFCIDASQPDVGSWLKYIRFAGCYDQHNLVACQINDQIFYRVVADIAPGEELLLFMKSEDYPHETMAPDIHEERQYRCEDCDQLFESKAELADHQKFPCSTPHSAFSMVEEDFQQKLESENDLQEIHTIQECKECDQVFPDLQSLEKHMLSHTEEREYKCDQCPKAFNWKSNLIRHQMSHDSGKHYECENCAKVFTDPSNLQRHIRSQHVGARAHACPECGKTFATSSGLKQHKHIHSSVKPFICEVCHKSYTQFSNLCRHKRMHADCRTQIKCKDCGQMFSTTSSLNKHRRFCEGKNHFAAGGFFGQGISLPGTPAMDKTSMVNMSHANPGLADYFGANRHPAGLTFPTAPGFSFSFPGLFPSGLYHRPPLIPASSPVKGLSSTEQTNKSQSPLMTHPQILPATQDILKALSKHPSVGDNKPVELQPERSSEERPFEKISDQSESSDLDDVSTPSGSDLETTSGSDLESDIESDKEKFKENGKMFKDKVSPLQNLASINNKKEYSNHSIFSPSLEEQTAVSGAVNDSIKAIASIAEKYFGSTGLVGLQDKKVGALPYPSMFPLPFFPAFSQSMYPFPDRDLRSLPLKMEPQSPGEVKKLQKGSSESPFDLTTKRKDEKPLTPVPSKPPVTPATSQDQPLDLSMGSRSRASGTKLTEPRKNHVFGGKKGSNVESRPASDGSLQHARPTPFFMDPIYRVEKRKLTDPLEALKEKYLRPSPGFLFHPQMSAIENMAEKLESFSALKPEASELLQSVPSMFNFRAPPNALPENLLRKGKERYTCRYCGKIFPRSANLTRHLRTHTGEQPYRCKYCDRSFSISSNLQRHVRNIHNKEKPFKCHLCDRCFGQQTNLDRHLKKHENGNMSGTATSSPHSELESTGAILDDKEDAYFTEIRNFIGNSNHGSQSPRNVEERMNGSHFKDEKALVTSQNSDLLDDEEVEDEVLLDEEDEDNDITGKTGKEPVTSNLHEGNPEDDYEETSALEMSCKTSPVRYKEEEYKSGLSALDHIRHFTDSLKMRKMEDNQYSEAELSSFSTSHVPEELKQPLHRKSKSQAYAMMLSLSDKESLHSTSHSSSNVWHSMARAAAESSAIQSISHV

SEQ ID NO: 106 - DNA, 5938 bp, Homo sapiens
tttccaggcactctcattcatagagccagcgggcgcgggcgggacgggcgccccgcggccggacccagccagggcaccacgctgcccggccctgcgccgccaggcacttctttccggggctcctagggacgccagaaggaagtcaacctctgctgcttctccttggcctgcgttggaccttcctttttttgttgtttttttttgtttttcccctttcttccttttgaattaactggcttcttggctggatgttttcaacttctttcctggctgcgaactttttccccaattgttttccttttacaacagggggagaaagtgctctgtggtccgaggcgagccgtgaagttgcgtgtgcgtggcagtgtgcgtggcaggatgtgcgtgcgtgtgtaacccgagccgcccgatctgtttcgatctgcgccgcggagccctccctcaaggcccgctccacctgcttggcggttacgcggcgctcgtgggtgttcgtgccttcggagcagctaaccggcgggtgctgggcgacggtggaggagtatcgttctcgctgcttgcccgagtcagggctgagtcaccccagctgatgtagacagtggctgccttccgaagagtgcgtgtttgcatgtgtgtgactctgcggctgctcaactcccaacaaaccagaggaccagccacaaacttaaccaacatccccaaacccgagttcacagatgtgggagagctgtagaaccctgagtgtcatcgactgggccttcttatgattgttgttttaagattagctgaagatctctgaaacgctgaattttctgcactgagcgtttgacagaattcattgagagaacagagaacatgacaagtacttctagctcagcactgctccaactactgaagctgattttcaaggctacttaaaaaaatctgcagcgtacattaatggatttctgttgtgtttaaattctccacagattgtattgtaaatattttatgaagtagagcatatgtatatatttatatatacgtgcacatacattagtagcactacctttggaagtctcagctcttgcttttcgggactgaagccagttttgcatgataaaagtggccttgttacgggagataattgtgttctgttgggactttagacaaaactcacctgcaaaaaactgacaggcattaactactggaacttccaaataatgtgtttgctgatcgttttactcttcgcataaatattttaggaagtgtatgagaattttgccttcaggaacttttctaacagccaaagacagaacttaacctctgcaagcaagattcgtggaagatagtctccactttttaatgcactaagcaatcggttgctaggagcccatcctgggtcagaggccgatccgcagaaccagaacgttttcccctcctggactgttagtaacttagtctccctcctcccctaaccacccccgcccccccccaccccccgcagtaataaaggcccctgaacgtgtatgttggtctcccgggagctgcttgctgaagatccgcgcccctgtcgccgtctggtaggagctgtttgcagggtcctaactcaatcggcttgttgtgatgcgtatccccgtagatgccagcacgagccgccgcttcacgccgccttccaccgcgctgagcccaggcaagatgagcgaggcgttgccgctgggcgccccggacgccggcgctgccctggccggcaagctgaggagcggcgaccgcagcatggtggaggtgctggccgaccacccgggcgagctggtgcgcaccgacagccccaacttcctctgctccgtgctgcctacgcactggcgctgcaacaagaccctgcccatcgctttcaaggtggtggccctaggggatgttccagatggcactctggtcactgtgatggctggcaatgatgaaaactactcggctgagctgagaaatgctaccgcagccatgaagaaccaggttgcaagatttaatgacctcaggtttgtcggtcgaagtggaagagggaaaagcttcactctgaccatcactgtcttcacaaacccaccgcaagtcgccacctaccacagagccatcaaaatcacagtggatgggccccgagaacctcgaaataatgagtgtgtatatggcaactaccctgaaatacctttggaagaaatgccagatgcagatggagtagccagcactccctccctcaatattcaagagccatgctctcctgccacatccagtgaagcattcactccaaaggagggttctccttacaaagcccccatctacatccctgatgatatccccattcctgctgagtttgaacttcgagagtcaaatatgcctggggcaggactaggaatatggaccaaaaggaagatcgaagtaggtgaaaagtttgggccttatgtgggagagcagaggtcaaacctgaaagaccccagttatggatgggagatcttagacgaattttacaatgtgaagttctgcatagatgccagtcaaccagatgttggaagctggctcaagtacattagattcgctggctgttatgatcagcacaaccttgttgcatgccagataaatgatcagatattctatagagtagttgcagacattgcgccgggagaggagcttctgctgttcatgaagagcgaagactatccccatgaaactatggcgccggatatccacgaagaacggcaatatcgctgcgaagactgtgaccagctctttgaatctaaggctgaactagcagatcaccaaaagtttccatgcagtactcctcactcagcattttcaatggttgaagaggactttcagcaaaaactcgaaagcgagaatgatctccaagagatacacacgatccaggagtgtaaggaatgtgaccaagtttttcctgatttgcaaagcctggagaaacacatgctgtcacatactgaagagagggaatacaagtgtgatcagtgtcccaaggcatttaactggaagtccaatttaattcgccaccagatgtcacatgacagtggaaagcactatgaatgtgaaaactgtgccaaggttttcacggaccctagcaaccttcagcggcacattcgctctcagcatgtcggtgcccgggcccatgcatgcccggagtgtggcaaaacgtttgccacttcgtcgggcctcaaacaacacaagcacatccacagcagtgtgaagccctttatctgtgaggtctgccataaatcctatactcagttttcaaacctttgccgtcataagcgcatgcatgctgattgcagaacccaaatcaagtgcaaagactgtggacaaatgttcagcactacgtcttccttaaataaacacaggaggttttgtgagggcaagaaccattttgcggcaggtggattttttggccaaggcatttcacttcctggaaccccagctatggataaaacgtccatggttaatatgagtcatgccaacccgggccttgctgactattttggcgccaataggcatcctgctggtcttacctttccaacagctcctggattttcttttagcttccctggtctgtttccttccggcttgtaccacaggcctcctttgatacctgctagttctcctgttaaaggactatcaagtactgaacagacaaacaaaagtcaaagtcccctcatgacacatcctcagatactgccagctacacaggatattttgaaggcactatctaaacacccatctgtaggggacaataagccagtggagctccagcccgagaggtcctctgaagagaggccctttgagaaaatcagtgaccagtcagagagtagtgaccttgatgatgtcagtacaccaagtggcagtgacctggaaacaacctcgggctctgatctggaaagtgacattgaaagtgataaagagaaatttaaagaaaatggtaaaatgttcaaagacaaagtaagccctcttcagaatctggcttcaataaataataagaaagaatacagcaatcattccattttctcaccatctttagaggagcagactgcggtgtcaggagctgtgaatgattctataaaggctattgcttctattgctgaaaaatactttggttcaacaggactggtggggctgcaagacaaaaaagttggagctttaccttacccttccatgtttcccctcccattttttccagcattctctcaatcaatgtacccatttcctgatagagacttgagatcgttacctttgaaaatggaaccccaatcaccaggtgaagtaaagaaactgcagaagggcagctctgagtccccctttgatctcaccactaagcgaaaggatgagaagcccttgactccagtcccctccaagcctccagtgacacctgccacaagccaagaccagcccctggatctaagtatgggcagtaggagtagagccagtgggacaaagctgactgagcctcgaaaaaaccacgtgtttgggggaaaaaaaggaagcaacgtcgaatcaagacctgcttcagatggttccttgcagcatgcaagacccactcctttctttatggaccctatttacagagtagagaaaagaaaactaactgacccacttgaagctttaaaagagaaatacttgaggccttctccaggattcttgtttcacccacaaatgtcagctattgaaaacatggcagaaaagctagagagcttcagtgccctgaaacctgaggccagtgagctcttacagtcagtgccctctatgttcaacttcagggcgcctcccaatgccctgccagagaaccttctgcggaagggaaaggagcgctatacctgcagatactgtggcaagatttttccaaggtctgcaaacctaacacggcacttgagaacccacacaggagagcagccttacagatgcaaatactgtgacagatcatttagcatatcttctaacttgcaaaggcatgttcgcaacatccacaataaagagaagccatttaagtgtcacttatgtgataggtgttttggtcaacaaaccaatttagacagacacctaaagaaacatgagaatgggaacatgtccggtacagcaacatcgtcgcctcattctgaactggaaagtacaggtgcgattctggatgacaaagaagatgcttacttcacagaaattcgaaatttcattgggaacagcaaccatggcagccaatctcccaggaatgtggaggagagaatgaatggcagtcattttaaagatgaaaaggctttggtgaccagtcaaaattcagacttgctggatgatgaagaagttgaagatgaggtgttgttagatgaggaggatgaagacaatgatattactggaaaaacaggaaaggaaccagtgacaagtaatttacatgaaggaaaccctgaggatgactatgaagaaaccagtgccctggagatgagttgcaagacatccccagtgaggtataaagaggaagaatataaaagtggactttctgctctagatcatataaggcacttcacagatagcctcaaaatgaggaaaatggaagataatcaatattctgaagctgagctgtcttcttttagtacttcccatgtgccagaggaacttaagcagccgttacacagaaagtccaaatcgcaggcatatgctatgatgctgtcactgtctgacaaggagtccctccattctacatcccacagttcttccaacgtgtggcacagtatggccagggctgcggcggaatccagtgctatccagtccataagccacgtatgacgttatcaaggttgaccagagtgggaccaagtccaacagtagcatggctctttcatataggactatttacaagactgctgagcagaatgccttataaacctgcagggtcactcatctaaagtctagtgaccttaaactgaatgattta

SEQ ID NO: 107 - protein, 261 aa, Homo sapiens
MNPSRDVHDASTSRRFTPPSTALSPGKMSEALPLGAPDAGAALAGKLRSGDRSMVEVLADHPGELVRTDSPNFLCSVLPTHWRCNKTLPIAFKVVALGDVPDGTLVTVMAGNDENYSAELRNATAAMKNQVARFNDLRFVGRSGRGKSFTLTITVFTNPPQVATYHRAIKITVDGPREPRRHRQKLDDQTKPGSLSFSERLSELEQLRRTAMRVSPHHPAPTPNPRASLNHSTAFNPQPQSQMQESWMLPILSSFCKKGSK

SEQ ID NO: 108 - DNA, 1025 bp, Homo sapiens
atgaatccttctagagacgtccacgatgccagcacgagccgccgcttcacgccgccttccaccgcgctgagcccaggcaagatgagcgaggcgttgccgctgggcgccccggacgccggcgctgccctggccggcaagctgaggagcggcgaccgcagcatggtggaggtgctggccgaccacccgggcgagctggtgcgcaccgacagccccaacttcctctgctccgtgctgcctacgcactggcgctgcaacaagaccctgcccatcgctttcaaggtggtggccctaggggatgttccagatggcactctggtcactgtgatggctggcaatgatgaaaactactcggctgagctgagaaatgctaccgcagccatgaagaaccaggttgcaagatttaatgacctcaggtttgtcggtcgaagtggaagagggaaaagcttcactctgaccatcactgtcttcacaaacccaccgcaagtcgccacctaccacagagccatcaaaatcacagtggatgggccccgagaacctcgaagacatcggcagaaactagatgatcagaccaagcccgggagcttgtccttttccgagcggctcagtgaactggagcagctgcggcgcacagccatgagggtcagcccacaccacccagcccccacgcccaaccctcgtgcctccctgaaccactccactgcctttaaccctcagcctcagagtcagatgcaggaatcatggatgctgccaattttgagcagtttttgcaagaaaggatcaaagtgaacggaaaagctgggaaccttggtggaggggtggtgaccatcgaaaggagcaagagcaagatcaccgtgacatccgaggtgcctttctccaaaaggtatttgaaatatctcaccaaaaaatatttgaagaagaataatctacgtgactggttgcgcgtagttgctaacagcaaagagagttacgaattacgttacttccagattaaccaggacgaagaagaggaggaagacgaggattaa

SEQ ID NO: 109 - DNA, 470 bp, Homo sapiens
tgtcggtcgaagtggaagagggaaaagcttcactctgaccatcactgtcttcacaaacccaccgcaagtcgccacctaccacagagccatcaaaatcacagtggatgggccccgagaacctcgaaaatcatggatgctgccaattttgagcagtttttgcaagaaaggatcaaagtgaacggaaaagctgggaaccttggtggaggggtggtgaccatcgaaaggagcaagagcaagatcaccgtgacatccgaggtgcctttctccaaaaggtatttgaaatatctcaccaaaaaatatttgaagaagaataatctacgtgactggttgcgcgtagttgctaacagcaaagagagttacgaattacgttacttccagattaaccaggacgaagaagaggaggaagacgaggattaaatttcatttatctggaaaattttgtatgagttcttgaataaaacttgggaacc

SEQ ID NO: 110 - protein, 17 aa, Homo sapiens
GMGGSDRGGFNKFGGSG

SEQ ID NO: 111 - DNA, 55 bp, Homo sapiens
gtggcatgggcggaagtgaccgtggtggcttcaataaatttggtggcagtggcca

SEQ ID NO: 112 - protein, 32 aa, Homo sapiens [sequence omitted]

SEQ ID NO: 113 - DNA, 99 bp, Homo sapiens
gtggcatgggccgttggaagcttcatgtcctttcttctaacttgtcttctccagcggaagtgaccgtggtggcttcaataaatttggtggcagtggcca

SEQ ID NO: 114 - DNA, 120 bp, Homo sapiens
atccttttgatcgttgtgtccaaggcttgtgtgtgtgtgagtgtgtgggagacaactccgaacagtcctgagccctatgtctttatggctactgggtaaaatagtcaagtgagaaattag

SEQ ID NO: 115 - protein, 375 aa, Homo sapiens
MSASAPAAEGEGTPTQPASEKEPEMPGPREESEEEEDEDDEEEEEEEKEKSLIVEGKREKKKVERLTMQVSSLQREPFTIAQGKGQKLCEIERIHFFLSKKKTDELRNLHKLLYNRPGTVSSLKKNVGQFSGFPFEKGSVQYKKKEEMLKKFRNAMLKSICEVLDLERSGVNSELVKRILNFLMHPKPSGKPLPKSKKTCSKGSKKERNSSGMARKAKRTKCPEILSDESSSDEDEKKNKEESSDDEDKESEEEPPKKTAKREKPKQKATSKSKKSVKSANVKKADSSTTKKNQNSSKKESESEDSSDDEPLIKKLKKPPTDEELKETIKKLLASANLEEVTMKQICKKVYENYPTYDLTERKDFIKTTVKELIS

SEQ ID NO: 116 - DNA, 2699 bp, Homo sapiens
  modified_base (1740): a, c, t, g, other or unknown
ggcccgcggcggccgaaatccgcggttcacagcatgtccgcctcggcccctgctgcggagggggagggaacccccacccagcccgcgtccgagaaagaacccgaaatgcccggtcccagagaggagagcgaggaggaagaggacgaggacgacgaggaggaggaggaggaggaaaaagaaaagagtctcatcgtggaaggcaagagggaaaagaaaaaagtagagaggttgacaatgcaagtctcttccttacagagagagccatttacaattgcacaaggaaaggggcagaaactttgtgaaattgagaggatacatttttttctaagtaagaagaaaaccgatgaacttagaaatctacacaaactgctttacaacaggccaggcactgtgtcctcattaaagaagaatgtgggtcagttcagtggctttccatttgaaaaaggaagtgtccaatataaaaagaaggaagaaatgttgaaaaaatttagaaatgccatgttaaagagcatctgtgaggttcttgatttggagagatcaggtgtaaatagtgaactagtgaagaggatcttgaatttcttaatgcatccaaagccttctggcaaaccattgccgaaatctaaaaaaacttgtagcaaaggcagtaaaaaggaacggaacagttctggaatggcaaggaaggctaagcgaaccaaatgtcctgaaattctgtcagatgaatctagtagtgatgaagatgaaaagaaaaacaaggaagagtcttcagatgatgaagataaagaaagtgaagaggagccaccaaaaaagacagccaaaagagaaaaacctaaacagaaagctacttctaaaagtaaaaaatctgtgaaaagtgccaatgttaagaaagcagatagcagcaccaccaagaagaatcaaaacagttccaaaaaagaaagtgagtctgaggatagttcagatgatgaacctttaattaaaaagttgaagaaaccccctacagatgaagagttaaaggaaacaataaagaaattactggccagtgctaacttggaagaagtcacaatgaaacagatttgcaaaaaggtctatgaaaattatcctacttatgatttaactgaaagaaaagatttcataaaaacaactgtaaaagagctaatttcttgagatagaggacagagaagatgactcgttcccatagatttgaagatctgatttataccattataccagcaaagagaatgtatttccttttctaaatccttgttaagcaacgttagtagaacttactgctgacctttttatcttgagtgttatgtgaatttgagtttgctgttttaaattgcatttctatgccatttttagtttaaaatcttgcatggcattaattgttccttgcttttatagttgtattttgtacattttggatttctttatataaggtcatagattcttgagctgttgtggtttttagtgcacttaatattagcttgcttaaggcatacttttaatcaagtagaacaaaaactattatcaccaggatttatacatacagagattgtagtatttagtatatgaaatattttgaatacacatctctgtcagtgtgaaaattcagcggcagtgtgtccatcatattaaaaatatacaagctacagttgtccagatcactgaattggaacttttctcctgcatgtgtatatatgtcaaattgtcagcatgacaaaagtgacagatgttattttngtatttttaaaaaacaattggttgtatataaagtttttttatttcttttgtgcagatcactttttaaactcacataggtaggtatctttatagttgtagactatggaatgtcagtgttcagccaaacagtatgatggaacagtgaaagtcaattcagtgatggcaacactgaaggaacagttaccctgctttgcctcgaaagtgtcatcaatttgtaattttagtattaactctgtaaaagtgtctgtaggtacgttttatattatataaggacagaccaaaaatcaacctatcaaagcttcaaaaactttgggaaagggtgggattaagtacaagcacatttggcttacagtaaatgaactgatttttattaactgcttttgcccatataaaatgctgatatttactggaaacctagccagcttcacgattatgactaaagtaccagattataatgccagaatataatgtgcaggcaatcgtggatgtctctgacaaagtgtgtctcaaaaataatatacttttacattaaagaaatttaatgtttctctggagttggggctcttggctttcagagtttggttaatcagtgttgattctagatgatcaacataatggaccactcctgaatgagacttaattttgtctttcaaatttactgtcttaaatcagtttattaaatctgaattttaaaacatgctgtttatgacacaatgacacatttgttgcaccaattaagtgttgaaaaatatctttgcatcatagaacagaaatatataaaaatatatgttgaatgttaacaggtattttcacaggtttgtttcttgatagttactcagacactagggaaaggtaaatacaagtgaacaaaataagcaactaaatgagacctaataattggccttcgattttaaatatttgttcttataaaccttgtcaataaaaataaatctaaatca

SEQ ID NO: 117 - DNA, 288 bp, Homo sapiens
gtcaacagtcgcccaaaatttaaataaaattattgcaggcctataataagttaaatagctaaaattttaaataatgacagattcagtttttagtgctgacagtgttctttgattttgcaaacaaatgagtatttctcaaatgggaagacgtcttatatgttctatgctgtgaatagataggtttagaattactttcagcaccgttttgtctccattacagttaattttatgggtgggagagcaaaatctaaatggatgcactgtctgagtaccagaatgaatggaaaa

SEQ ID NO: 118 - protein, 277 aa, Homo sapiens
MSAQAAKVSKKELNSNHDGADETSEKEQQEAIEHIDEVQNEIDRLNEQASEEILKVEQKYNKLRQPFFQKRSELIAKIPNFWVTTFVNHPQVSALLGEEDEEALHYLTRVEVTEFEDIKSGYRIDFYFDENPYFENKVLSKEFHLNESGDPSSKSTEIKWKSGKDLTKRSSQTQNKASRKRQHEEPESFFTWFTDHSDAGADELGEVIKDDIWPNPLQYYLVPDMDDEEGEGEEDDDDDEEEEGLEDIDEEGDEDEGEEDEDDDEGEEGEEDEGEDD

SEQ ID NO: 119 - DNA, 2577 bp, Homo sapiens
cacatgtcggcgcaggcggccaaagtcagtaaaaaggagctcaactccaaccacgacggggccgacgagacctcagaaaaagaacagcaagaagcgattgaacacattgatgaagtacaaaatgaaatagacagacttaatgaacaagccagtgaggagattttgaaagtagaacagaaatataacaaactccgccaaccattttttcagaagaggtcagaattgatcgccaaaatcccaaatttttgggtaacaacatttgtcaaccatccacaagtgtctgcactgcttggggaggaagatgaagaggcactgcattatttgaccagagttgaagtgacagaatttgaagatattaaatcaggttacagaatagatttttattttgatgaaaatccttactttgaaaataaagttctctccaaagaatttcatctgaatgagagtggtgatccatcttcgaagtccaccgaaatcaaatggaaatctggaaaggatttgacgaaacgttcgagtcaaacgcagaataaagccagcaggaagaggcagcatgaggaaccagagagcttctttacctggtttactgaccattctgatgcaggtgctgatgagttaggagaggtcatcaaagatgatatttggccaaacccattacagtactacttggttcccgatatggatgatgaagaaggagaaggagaagaagatgatgatgatgatgaagaggaggaaggattagaagatattgacgaagaaggggatgaggatgaaggtgaagaagatgaagatgatgatgaaggggaggaaggagaggaggatgaaggagaagatgactaaatagaacactgatggattccaaccttcctttttttaaattttctccagtccctgggagcaagttgcagtctttttttttttttttttttttttccctcttgtgctcagtcgccctgttcttgaggtctcttttctctactccatggttctcaatttatttggggggaaataccttgagcagaatacaatgggaaaagagtctctacccctttctgttcgaagttcatttttatcccttcctgtctgaacaaaaactgtatggaatcaacaccaccgagctctgtgggaaaaaagaaaaacctgctccctttgctctgctggaagctggagggtgctaggcccctgtgtagtagtgtatagaattctagcttttttcctcctttctctgtatattgggctcagagagtacactgtgtctctatgtgaatatggacagttagcatttaccaacatgtatctgtctactttctcttgtttaaaaaaagaaaaaaaaacttaaaaaaatggggttatagaaggtcagcaaaggggtggggtttgagatgtttgggtgggttagtgggcattttgacaacatggcttctcctttggcatgtttaattgtgatatttgacagacatccttgcagtttaagatgacacttttaaaataaattctctcctaatgatgacttgagccctgccactcaatgggagaatcagcagaacctgtaggatcttatttggaattgacattctctattgtaattttgttcctgtttatttttgggtttctttttgtttcactggaaaggaaagatgatgctcagttttaaacgttaaaagtgtacaagttgctttgttacaataaaactaaatgtgtacacaaaggatttgatgcttttctctcagcataggtatgcttactatgaccttccaagtttgacttgtataacatcactgtcaaactttgtcaccctaacttcgtattttttgatacgcacttttgcaggatgacctcagggctatgtggattgagtaatgggatttgaatcaatgtattaatatctccatagctgggaaacgtgggttcaatttgccattggtttctgaaaagtattcacatcatttgggataccagatagctcaatactctctgagtacattgtgcccttgatttttatctccaagtggcagtttttaaaattggccttttacctggatataaattaattgtgcctgccaccaccatccaacagacctggtgctctaatgccaagttatacacgggacagttgctggcatgtcttcattggctctctaaaatgtggccaagaagataggctctcagtaagaagtctgatggtgagcagtaactgtccctgctttctggtataaagctctcaaatgtgaccatgtgaatctgggtgggataatggactcagctctgtctgctcaatgccattgtgcagagaagcaccctaatgcataagctttttaatgctgtaaaatatagtcgctgaaattaaatgccactttttcagaggtgaattaatggacagtctggtgaacttcaaaagctttttgatgtataaaacttgataaatggaactattccatcaataggcaaaagtgtaacaacctatctagatggatagtatgtaatttctgcacaggtctctgtttagtaaatacatcactgtataccgatcaggaatcttgctccaataaaggaacataaagatttaaaaaaaaaaaaaaa

SEQ ID NO: 120 - protein, 288 aa, Homo sapiens [sequence omitted]

SEQ ID NO: 121 - DNA, 1073 bp, Homo sapiens
gcactaagtcttgcacttgtcacaaacagtgcacctacttcaagttctacaaagaaaacacagctacaactggagcatttactgctggatttacagatgattttgaatggaattaataattacaagaatcccaaactcaccaggatgctcacatttaagttttacatgcccaagaaggccacagaactgaaacatcttcagtgtctagaagaagaactcaaacctctggaggaagtgctaaatttagctcaaagcaaaaactttcacttaagacccagggacttaatcagcaatatcaacgtaatagttctggaactaaagatggctgggcagtgctcccaaaatgaatattttgacagtttgttgcatgcttgcataccttgtcaacttcgatgttcttctaatactcctcctctaacatgtcagcgttattgtaatgcaagtgtgaccaattcagtgaaaggaacgaatgcgattctctggacctgtttgggactgagcttaataatttctttggcagttttcgtgctaatgtttttgctaaggaagataagctctgaaccattaaaggacgagtttaaaaacacaggatcaggtctcctgggcatggctaacattgacctggaaaagagcaggactggtgatgaaattattcttccgagaggcctcgagtacacggtggaagaatgcacctgtgaagactgcatcaagagcaaaccgaaggtcgactctgaccattgctttccactcccagctatggaggaaggcgcaaccattcttgtcaccacgaaaacgaatgactattgcaagagcctgccagctgctttgagtgctacggagatagagaaatcaatttctgctaggtaattaaccatttcgactcgagcagtgccactttaaaaatcttttgtcagaatagatgatgtgtcagatctctttaggatgactgtatttttcagttgccgatacagctttttgtcctctaactgtggaaactctttatgttagatatatttctctaggttactgttgggagcttaatggtagaaacttccttggtttctatgattaaa

SEQ ID NO: 122 - protein, 26 aa, Homo sapiens
EFEDRDRSHREEMEFKRAKANLDKNK

SEQ ID NO: 123 - DNA, 78 bp, Homo sapiens
gaatttgaagatagagacaggtctcatcgggaggaaatggagttcaagagggccaaggcgaacctagacaagaataag

SEQ ID NO: 124 - protein, 34 aa, Homo sapiens
EFEDRDRSHREEMEVHELEKSKRALETQMEEMKT

SEQ ID NO: 125 - DNA, 102 bp, Homo sapiens
gaatttgaagatagagacaggtctcatcgggaggaaatggaggtccatgagctggagaagtccaagcgggccctggagacccagatggaggagatgaagacg

SEQ ID NO: 126 - protein, 50 aa, Homo sapiens
EFEDRDRSHREEMENEVESVTGMLNEAEGKAIKLAKDVASLSSQLQDTQE

SEQ ID NO: 127 - DNA, 152 bp, Homo sapiens
gaatttgaagatagagacaggtctcatcgggaggaaatggagaatgaagttgagagcgtcacagggatgcttaacgaggccgaggggaaggccattaagctggccaaggacgtggcgtccctcagttcccagctccaggacacccaggagtt

SEQ ID NO: 128 - DNA, 1353 bp, Homo sapiens
  modified_base (941): a, c, t, g, other or unknown
  modified_base (1067): a, c, t, g, other or unknown
  modified_base (1077): a, c, t, g, other or unknown
cttggccaacattctggaggcagtaaagaaagcttatagaataaccacatattagaacttgtgaaggagaaaatatacatatatatatatgtatatatatagtctctctattaagtaatttaccataaggggtttaaataggaatgttttctccaaagtgaatcttgaaatcttggtgtttataattgtcaagcctctttttttaaaatagatttggtcaacaggaagtatttttttctaatttttattttatagacctagtcaagcttcttaattgttaaatattgttataacaatacatctgggccgggcgcggtggctcactcctgtaatcccagcactttgggaggccagggcgggtgaatcacgaggtcaggagattgagaccatcctggctaacacaaagaaaccccatctctactaaaaatacaaaaaattagctgggagaggaggagggcgcctgtagtcccagctactcgggaggcggagcttgcggtgagccaagatcgcgccactgcactccagcgactccgtctcaaaaaaaaaaaaaaaaaaacatctgagtcggtacatggttgttagccgaggagaaaaacatctcttccaaatacgcggatgagagggacagagctgaggcagaagccagggagaaggaaaccaaggccctgtccctggctcgggcccttgaagaggccttggaagccaaagaggaactcgagcggaccaacaaaatgctcaaagccgaaatggaagacctggtcagctccaaggatgacgtgggcaagaacgtaagtggctctgggtggtttttctcgtccatgtttcgcctgcccaccctctgtgctattcaccagtccatgcgaggctagctcctggcctttttcatagcgaactatcatcggaaatggaaggaggtttttggactggtgcaggggctaaanaggggctgagaatggcagtcgaggatgggtctgagttggggggtccgaggataaggctggggtctgaactctcaggggtcatcttgagtcccggccatgcatcctgtgggaggccaaagccacctnccctgatctncctgaggtgccgctcacggtgggtttctcaatcgtcttcatgaagttgagcctcatagaatggggctgcccgctctgccggcaggtccatgagctggagaagtccaagcgggccctggagacccagatggaggagatgaagacgcagctggaagagctggaggacgagctgcaagccacggaggacgccaaactgcggctggaagtcaacatgcaggcgctcaagggccagttcgaaagggatctccaagcccgggacgagcagaatgaggagaag

SEQ ID NO: 129 - DNA, 744 bp, Homo sapiens
  modified_base (326): a, c, t, g, other or unknown
  modified_base (614): a, c, t, g, other or unknown
gcccggcttaaaatttagtatcttttagtgattgctagatctctttgtcagtgagttaattaatctaatgggctgatagcagctgaggatgtccccaagaatacttgttagctaagagaagaaaatggagggatatatgtgatacttgttttctttgatgctgttgtaattcttgtgattttcatatatgtgaatacaagacttccacaccatgccctttctttcggtatctgtaaaatttagaagctttaaaatgtataatgtacatttgttacatttctgaacctttttgctcatgctctttgttccctgatgtagaatgttcnattctgtccgtcaaggcccaacctgaatgttgtcattaaatgtcaggcctttcctcagtctctggggtctgaactgctcaggggtcatcttgagtcccggccatgcatcctgtgggaggccaaagccacctccctgatctcctgaggtgccgctcacggtgggtttctcaatcgtcttcatgaagttgagcctcatagaatggggctgcccgctctgccggcaggtccatgagctggagaagtccaagcgggccctggagacccagatggaggagatgaagacgcagntggaagagctggaggacgagctgcaagccacggaggacgccaaactgcggctggaagtcaacatgcaggcgctcaagggccagttcgaaagggatctccaagcccgggacgagcagaatgaggagaagag

SEQ ID NO: 130 - protein, 29 aa, Homo sapiens
REFEDRDRSHREEMEELLQEETRQKLNVS

SEQ ID NO: 131 - DNA, 89 bp, Homo sapiens
acgcgaatttgaagatagagacaggtctcatcgggaggaaatggaggagctgcttcaagaagaaacccggcagaagctcaacgtgtcta

SEQ ID NO: 132 - protein, 452 aa, Homo sapiens
MSETPAQCSIKQERISYTPPESPVPSYASSTPLHVPVPRALRMEEDSIRLPAHLRLQPIYWSRDDVAQWLKWAENEFSLRPIDSNTFEMNGKALLLLTKEDFRYRSPHSGDVLYELLQHILKQRKPRILFSPFFHPGNSIHTQPEVILHQNHEEDNCVQRTPRPSVDNVHHNPPTIELLHRSRSPITTNHRPSPDPEQRPLRSPLDNMIRRLSPAERAQGPRPHQENNHQESYPLSVSPMENNHCPASSESHPKPSSPRQESTRVIQLMPSPIMHPLILNPRHSVDFKQSRLSEDGLHREGKPINLSHREDLAYMNHIMVSVSPPEEHAMPIGRIADCRLLWDYVYQLLSDSRYENFIRWEDKESKIFRIVDPNGLARLWGNHKNRTNMTYEKMSRALRHYYKLNIIRKEPGQRLLFRFMKTPDEIMSGRTDRLEHLESQELDEQIYQEDEC

SEQ ID NO: 133 - DNA, 1956 bp, Homo sapiens
tcctgatctctctcgctgtgagacatgtctgagactcctgctcagtgtagcattaagcaggaacgaatttcatatacacctccagagagcccagtgccgagttacgcttcctcgacgccacttcatgttccagtgcctcgagcgctcaggatggaggaagactcgatccgcctgcctgcgcacctgcgcttgcagccaatttactggagcagggatgacgtagcccagtggctcaagtgggctgaaaatgagttttctttaaggccaattgacagcaacacgtttgaaatgaatggcaaagctctcctgctgctgaccaaagaggactttcgctatcgatctcctcattcaggtgatgtgctctatgaactccttcagcatattctgaagcagaggaaacctcggattcttttttcaccattcttccaccctggaaactctatacacacacagccggaggtcatactgcatcagaaccatgaagaagataactgtgtccagaggacccccaggccatccgtggataatgtgcaccataaccctcccaccattgaactgttgcaccgctccaggtcacctatcacgacaaatcaccggccttctcctgaccccgagcagcggcccctccggtcccccctggacaacatgatccgccgcctctccccggctgagagagctcagggacccaggccgcaccaggagaacaaccaccaggagtcctaccctctgtcagtgtctcccatggagaataatcactgcccagcgtcctccgagtcccacccgaagccatccagcccccggcaggagagcacacgcgtgatccagctgatgcccagccccatcatgcaccctctgatcctgaacccccggcactccgtggatttcaaacagtccaggctctccgaggacgggctgcatagggaagggaagcccatcaacctctctcatcgggaagacctggcttacatgaaccacatcatggtctctgtctccccgcctgaagagcacgccatgcccattgggagaatagcagactgtagactgctttgggattacgtctatcagttgctttctgacagccggtacgaaaacttcatccgatgggaggacaaagaatccaaaatattccggatagtggatcccaacggactggctcgactgtggggaaaccataagaacagaacaaacatgacctatgagaaaatgtccagagccctgcgccactactacaaactaaacattatcaggaaggagccaggacaaaggcttttgttcaggtttatgaaaaccccagatgaaatcatgagtggccgaacagaccgtctggagcacctagagtcccaggagctggatgaacaaatataccaagaagatgaatgctgaaggaaccaacagtccacctcagcgggccagcagcccagggaacccctgcccaccaggattgctggaagtgtgacggagcaggcgggctgaggagagtggaaaaggaagcgacccagaaatggcagggacacttctcttgcagaccaagagggaccctggagcaccttagacaaactacccagcacaggcggggctggaattctggcggatggcacgagcctgggactccatgtcacgtttccttctgatttggaatctctccatctgtaattcctcaccctcacccttccaccgttgttagtatcatggtgtttttgtttttgtttttgttttaagaacctgcagtttgactcttcatcgttcatctaggggaagacatctgatgttgttttcctatggaaatatatatctattatatatatatattttttgcaaatctcacaaagtgcggcaagcccagctggtcaggaaagagaatacttgcagaggggttcaggttcctctttttcctgccacgtggatcaggtctgttcctgttactgttgggtcttggctgaaaaaaaaaaaaaaaaa

SEQ ID NO: 134 - protein, 452 aa, Homo sapiens; identical to SEQ ID NO: 132

SEQ ID NO: 135 - DNA, 1580 bp, Homo sapiens
tcctgatctctctcgctgtgagacatgtctgagactcctgctcagtgtagcattaagcaggaacgaatttcatatacacctccagagagcccagtgccgagttacgcttcctcgacgccacttcatgttccagtgcctcgagcgctcaggatggaggaagactcgatccgcctgcctgcgcacctgcgcttgcagccaatttactggagcagggatgacgtagcccagtggctcaagtgggctgaaaatgagttttctttaaggccaattgacagcaacacgtttgaaatgaatggcaaagctctcctgctgctgaccaaagaggactttcgctatcgatctcctcattcaggtgatgtgctctatgaactccttcagcatattctgaagcagaggaaacctcggattcttttttcaccattcttccaccctggaaactctatacacacacagccggaggtcatactgcatcagaaccatgaagaagataactgtgtccagaggacccccaggccatccgtggataatgtgcaccataaccctcccaccattgaactgttgcaccgctccaggtcacctatcacgacaaatcaccggccttctcctgaccccgagcagcggcccctccggtcccccctggacaacatgatccgccgcctctccccggctgagagagctcagggacccaggccgcaccaggagaacaaccaccaggagtcctaccctctgtcagtgtctcccatggagaataatcactgcccagcgtcctccgagtcccacccgaagccatccagcccccggcaggagagcacacgcgtgatccagctgatgcccagccccatcatgcaccctctgatcctgaacccccggcactccgtggatttcaaacagtccaggctctccgaggacgggctgcatagggaagggaagcccatcaacctctctcatcgggaagacctggcttacatgaaccacatcatggtctctgtctccccgcctgaagagcacgccatgcccattgggagaatagcagactgtagactgctttgggattacgtctatcagttgctttctgacagccggtacgaaaacttcatccgatgggaggacaaagaatccaaaatattccggatagtggatcccaacggactggctcgactgtggggaaaccataagaacagaacaaacatgacctatgagaaaatgtccagagccctgcgccactactacaaactaaacattatcaggaaggagccaggacaaaggcttttgttcaggtttatgaaaaccccagatgaaatcatgagtggccgaacagaccgtctggagcacctagagtcccaggagctggatgaacaaatataccaagaagatgaatgctgaaggaaccaacagtccacctcagcgggccagcagcccagggaacccctgcccaccaggattgctggaagtgtgacggagcaggcgggctgaggagagtggaaaaggaagcgacccagaaatggcagggacacttctcttgcagaccaagagggaccctggagcaccttagacaaactacccagcacaggcggggctgg

SEQ ID NO: 136 - DNA, 1451 bp, Homo sapiens
ccctcgtggccgccctggtcctggctttctccggcatcatgattggtgagtgcacagagccccagggactcccaagggggcaggaaggcaggactgaatagtgtctcaggctgtgccacaggtgccaaggtgtcacttcgttatgctagtccctggaattgggtggggtggtgattagggcagcccaggccaagccaaaacggaagctcccaaccttccccccaccagagcagctgcagttccctgaggagcccctgattctgcacctcagccccgtgtgtatcctcctggctgatcagggggtggggagctccttcagtgtccatcacgatggtgaaagctcgcccccacccctagacgtcacttctagctcccacatgcttccaccggcgcagctcctgtttggctcccaccctatgtaatgcactagcccactcttccccaaaccagccctccaccaccctccaggcagagagataggaaaatcggtttctgagtatatttctgttcagcctgtgagccaaggtgagctgacctgcaggtcacagagaactcagtgtggtcccaaccagctcttactgctggcagagacatgcccaggacagatgggcagaggcttgaaaagggcagagggaaaggctcttgagagccctcgcaggccaggcccctgcaggcaaagggatctgccggtagaagggagatggcagcacacactgtgtccccatatggtgccatccctcaaagggacaggataataggagctaacacttgttgcatggttactacgtgctcggcaatttacacatttcaattcattcgatcctcaggtaaccctaatctgatcacggtcggtccattgcatagaggagggaactgagcacatagcgggtgactcatttgccctggcccatgtgttggggggctgggctttacacacagaatctacccactgaatcacaattttgttctggcttccatggagtttgccttccagaacatcctcacatgtaggagtgataatggtcactcacattggtagagctctttaggatttttcaaaaccattttatgttggtgaattcatttcattgacaaccctagagggtggggagtggcagcggttagggaaacagggcaggagttaccatccctgcctacagagagggaaactgcagtccaaagaggtcctgtgacctggtcctcatggctcagcttgtaagtaacaagaggcggaattagagcacagatccccagacaccaattcagatcctaggaagtctcagtttttagagtatttactatcagtgttctttttttttctgacttcttgctgcttgagttttataatgtctaataaattgtattttagctgtggaggaagatgcagagtcagaagatgaagaggaggaggatgtgaaactcttaagtatatctggaaagcggtctgcccc

SEQ ID NO: 137 - DNA, 1565 bp, Homo sapiens
tcccttgggggctttgaaataacaccaccagtggtcttaaggttgaagtgtggttcagggccagtgcatattagtggacagcacttagtaggtatgttatttttatatattatactacttagtttgtcctctttagtgcagttgcttggttcccagtttggacttaaagcatgggtatagtactactgtctttttaataggttccaatgtgagtctagaaattggagaggacaaataaatttttggggcggggtgggggggaggaaatcttgctgtcacccaggctagagtacagtggcacgatcttggctcactggaacctctccgggattcaagagatcctcctgtctcagcctccccagtagctggggccacagacgtgcaccaccaagtccagttgcgtttcatagttttagtagagaaggggtttcgtgatgttggccaggccgatcttgaactcctggccttaagctgatctgcacgccctggcctgtgaaagtgctagtattacacgtgtcagccactgtgcctggcctaaaaattattttttaataaagacagtctcattataacggctggagtgcagtgatgtgatcatagcttgctatatcctcgaactgctactgggttcacctcagcctctggaatagctagaactacaggcacactccacgcctggctaattttttttgtatatgtgcagatggggtctcagtatgttgcccagattggactcttggcctcaagtggtccgccttggcctccccaaagtgagattacaggcatgagccaccctccccaggcttcttgcatttaaaacaactataggaaacacaactgaccaagatcccagctgcaccctcaaatccactgctgtgattgcactgaagctgccctacccaatggctgagcacagcagaaatactaaggcaggccaattcctgggagtcatgggactcctctgatgactgactttggctccagaaccccttagggccttgctgaaacttccttaggctccattggcacccagggtgcttccacccaaccttccctccctccctcgttcacgtggggttatacttgcaacacagtctgctggttcacccagccttccctggctccctccccatttcctctcatgggcatttctcctaataaaatctgcagaccatattgggtctaatcccatctccagtctgcttcttggaggaaccagactaacatgactctgccctatataatacaaataattattttccatatatctgatttttagctttgcatttactttaaatcatgcttcaattaaagacacaccttctttaatcattttattagtatttctaagtatgatggaaaggttcagagctcaggggaggatatggagatccagggaggcttcctgtaggaagtggcctgtgtagtgcttcaagggccaggctgccaggccatgttgcagctgaccacccacctgcagtgtaccgccggaagcaccaggagctgcaagccatgcagatggagctgcagagccctgagtacaagctgagcaagtccgcacctcg

SEQ ID NO: 138 - DNA, 1679 bp, Homo sapiens
tcccttgggggctttgaaataacaccaccagtggtcttaaggttgaagtgtggttcagggccagtgcatattagtggacagcacttagtaggtatgttatttttatatattatactacttagtttgtcctctttagtgcagttgcttggttcccagtttggacttaaagcatgggtatagtactactgtctttttaataggttccaatgtgagtctagaaattggagaggacaaataaatttttggggcgggggggagaggaatcttgctgtcacccaggctagagtacagtggcacgatcttggctcactggaacctctccgggattcaagagatcctcctgtctcagcctccccagtagctggggccacagacgtgcaccaccaagtccagttgcgtttcatagttatagtagagaaggggtttcgtgatgttggccaggccgatcttgaactcctggccttaagctgatctgcacgccctggcctgtgaaagtgctagtattacacgtgtcagccactgtgcctggcctaaaaattattttttaataaagacagtctcattataacggctggagtgcagtgatgtgatcatagcttgctatatcctcgaactgctactgggttcacctcagcctctggaatagctagaactacaggcacactccacgcctggctaattttttttgtatatgtgcagatggggtctcagtatgttgcccagattggactcttggcctcaagtggtccgccttggcctccccaaagtgagattacaggcatgagccaccctccccaggcttcttgcatttaaaacctggcagtgaacattaggcctcaaaatacttttgttaaaaagttccttttcccatgtgctctttttttttttttttttttaaatagaatagaagtctcagtttttagagtcatttactatcagtgttcttttttttctgacccctgggccagctgcaccctcaaatccactgctgtgattgcactgaagctgccctacccaatggctgagcacagcagaaatactaaggcaggccaattcctgggagtcatgggactcctctgatgactgactttggctccagaaccccttagggccttgctgaaacttccttaggctccatggcacccagggtgcttccacccaaccttccctccctccctcgttcacgtggggttatacttgcaacacagtctgctggttcacccagccttccctggctccctccccatttcctctcatgggcatttctcctaataaaatctgcagaccgtattgggtctaatcccatctccagtctgcttcttggaggaaccagactaacatgactctgccctatataatacaaataattattttccatatatctgatttttagctttgcatttactttaaatcatgcttcaattaaagacacaccttctttaatcattttattagtatttctaagtatgatggaaaggttcagagctcaggggaggatatggagatccagggaggcttcctgtaggaagtggcctgtgtagtgcttcaagggccaggctgccaggccatgttgcagctgaccacccacctgcagtgtaccgccggaagcaccaggagctgcaagccatgcagatggagctgcagagccctgagtacaagctgagcaagtccgcacctcg

SEQ ID NO: 139 - protein, 680 aa, Homo sapiens
MEDSMDMDMSPLRPQNYLFGCELKADKDYHFKVDNDENEHQLSLRTVSLGAGAKDELHIVEAEAMNYEGSPIKVTLATLKMSVQPTVSLGGFEITPPVVLRLKCGSGPVHISGQHLVVYRRKHQELQAMQMELQSPEYKLSKLRTSTIMTDYNPNYCFAGKTSSISDLKEVPRKNITLIRGLGHGAFGEVYEGQVSGMPNDPSPLQVAVKTLPEVCSEQDELDFLMEALIISKFNHQNIVRCIGVSLQSLPRFILLELMAGGDLKSFLRETRPRPSQPSSLAMLDLLHVARDIACGCQYLEENHFIHRDIAARNCLLTCPGPGRVAKIGDFGMARDIYRASYYRKGGCAMLPVKWMPPEAFMEGIFTSKTDTWSFGVLLWEIFSLGYMPYPSKSNQEVLEFVTSGGRMDPPKNCPGPVYRIMTQCWQHQPEDRPNFAIILERIEYCTQDPDVINTALPIEYGPLVEEEEKVPVRPKDPEGVPPLLVSQQAKREEERSPAAPPPLPTTSSGKAAKKPTAAEVSVRVPRGPAVEGGHVNMAFSQSNPPSELHKVHGSRNKPTSLWNPTYGSWFTEKPTKKNNPIAKKEPHDRGNLGLEGSCTVPPNVATGRLPGASLLLEPSSLTANMKEVPLFRLRHFPCGNVNYGYQQQGLPLEAATAPGAGHYEDTILKSKNSMNQPGP

SEQ ID NO: 140 - DNA, 2043 bp, Homo sapiens
atggaagattcgatggacatggacatgagccccctgaggccccagaactatcttttcggttgtgaactaaaggccgacaaagattatcactttaaggtggataatgatgaaaatgagcaccagttatctttaagaacggtcagtttaggggctggtgcaaaggatgagttgcacattgttgaagcagaggcaatgaattacgaaggcagtccaattaaagtaacactggcaactttgaaaatgtctgtacagccaacggtttcccttgggggctttgaaataacaccaccagtggtcttaaggttgaagtgtggttcagggccagtgcatattagtggacagcacttagtagtgtaccgccggaagcaccaggagctgcaagccatgcagatggagctgcagagccctgagtacaagctgagcaagctccgcacctcgaccatcatgaccgactacaaccccaactactgctttgctggcaagacctcctccatcagtgacctgaaggaggtgccgcggaaaaacatcaccctcattcggggtctgggccatggcgcctttggggaggtgtatgaaggccaggtgtccggaatgcccaacgacccaagccccctgcaagtggctgtgaagacgctgcctgaagtgtgctctgaacaggacgaactggatttcctcatggaagccctgatcatcagcaaattcaaccaccagaacattgttcgctgcattggggtgagcctgcaatccctgccccggttcatcctgctggagctcatggcggggggagacctcaagtccttcctccgagagacccgccctcgcccgagccagccctcctccctggccatgctggaccttctgcacgtggctcgggacattgcctgtggctgtcagtatttggaggaaaaccacttcatccaccgagacattgctgccagaaactgcctcttgacctgtccaggccctggaagagtggccaagattggagacttcgggatggcccgagacatctacagggcgagctactatagaaagggaggctgtgccatgctgccagttaagtggatgcccccagaggccttcatggaaggaatattcacttctaaaacagacacatggtcctttggagtgctgctatgggaaatcttttctcttggatatatgccataccccagcaaaagcaaccaggaagttctggagtttgtcaccagtggaggccggatggacccacccaagaactgccctgggcctgtataccggataatgactcagtgctggcaacatcagcctgaagacaggcccaactttgccatcattttggagaggattgaatactgcacccaggacccggatgtaatcaacaccgctttgccgatagaatatggtccacttgtggaagaggaagagaaagtgcctgtgaggcccaaggaccctgagggggttcctcctctcctggtctctcaacaggcaaaacgggaggaggagcgcagcccagctgccccaccacctctgcctaccacctcctctggcaaggctgcaaagaaacccacagctgcagaggtctctgttcgagtccctagagggccggccgtggaagggggacacgtgaatatggcattctctcagtccaaccctccttcggagttgcacaaggtccacggatccagaaacaagcccaccagcttgtggaacccaacgtacggctcctggtttacagagaaacccaccaaaaagaataatcctatagcaaagaaggagccacacgacaggggtaacctggggctggagggaagctgtactgtcccacctaacgttgcaactgggagacttccgggggcctcactgctcctagagccctcttcgctgactgccaatatgaaggaggtacctctgttcaggctacgtcacttcccttgtgggaatgtcaattacggctaccagcaacagggcttgcccttagaagccgctactgcccctggagctggtcattacgaggataccattctgaaaagcaagaatagcatgaaccagcctgggccctga

SEQ ID NO: 141 - DNA, 180 bp, Homo sapiens
caggaccaccccagtagcatgggtgtttatgggcaggagtctggaggattttccggaccaggagagaaccggagcatgagtggccctgcatggaggacacataaagggttcctggaggttgacaatcacagttaccctctcatactcacatgcaaggacgaggaacttgtttcctattac

SEQ ID NO: 142 - DNA, 180 bp, Homo sapiens
aaggttgtatattgaggaaatttgagcaagctgccctgaagaaaggcatagtgacaagatgagagagatgcattgtttggagatgtgtttagccagtgcccttcttccccacgatcaggttcctggagcttaggatgtgtgatgcagaagaagtctggaaaggtaagaaacagaattgta

SEQ ID NO: 143 - DNA, 427 bp, Homo sapiens
tcaatggcactctcatcccttagcatcaggctcaagctcctgagaagcagcaggacttaactcactctgccttcacagtcagcagccactctctcagagctggtgtgggaatccaaagtgaataaatcagagccctcaagacactgaatgccaggagcatggtctgagggacagtgtgctataatagagatacatatggaggaagcggaggaggaaggagcagattgtgtttgagaatggcttaagcagagttgaagctatttctcagggttatcaacttccaccagaggaactggaatttgttgtatttctcctaaaatattgatggtgaacatttatgtttagaaatctcctcttagtgcctttacattactaaacattaagagatgattgaagggaaaatgcactttagaccaggtgaaattag

SEQ ID NO: 144 - DNA, 438 bp, Homo sapiens
gatccactcatcagaggggagtccacagtccccacagagggccggcatgtgtgggaggttaggaaatgtcagcactgccctgaaacaaatcaggcgtggcccttgccgagcacctggcacatagtaggtgctaaataaatatttgttgaatggatgaattgttaggtaagtagaaatagagagataggtaggtaggtaggtaggtaggtaggtagatagatagagacagataaataaatgggttgacagatgtgtggattggatgagtggatgggtgagttggtggatagatggattggattgtatagatgaattgaatggatggttgaatggatggatagatggatggatggttggaatagatggatggacggatggatggatggatggatggatggatggatggatgatgkatggatggacggacagacggacgga

SEQ ID NO: 145 - DNA, 135 bp, Homo sapiens
gtactagatagtgtcccacttggcccaactacgacatgcagaaaccaacaatgccaacccttggagctagaccttggattcaggagcttgatcccctacaactgctctggtatgtcaatatacctcttcggatga

SEQ ID NO: 146 - protein, 476 aa, Homo sapiens
MASTDYSTYSQAAAQQGYSAYTAQPTQGYAQTTQAYGQQSYGTYGQPTDVSYTQAQTTATYGQTAYATSYGQPPTGYTTPTAPQAYSQPVQGYGTGAYDTTTATVTTTQASYAAQSAYGTQPAYPAYGQQPAATAPTRPQDGNKPTETSQPQSSTGGYNQPSLGYGQSNYSYPQVPGSYPMQPVTAPPSYPPTSYSSTQPTSYDQSSYSQQNTYGQPSSYGQQSSYGQQSSYGQQPPTSYPPQTGSYSQAPSQYSQQSSSYGQQSPPLGGAQTISKNTEQRPQPDPYQILGPTSSRLANPGSGQIQLWQFLLELLSDSANASCITWEGTNGEFKMTDPDEVARRWGQRKSKPNMNYDKLSRALRYYYDKNIMTKVHGKRYAYKFDFHGIAQALQPHPTESSMYKYPSDISYMPSYHAHQQKVNFVPPHPSSMPVTSSSFFGAASQYWTSPTGGIYPNPNVPRHPNTHVPSHLGSYY

SEQ ID NO: 147 - DNA, 1431 bp, Homo sapiens
atggcgtccacggattacagtacctatagccaagctgcagcgcagcagggctacagtgcttacaccgcccagcccactcaaggatatgcacagaccacccaggcatatgggcaacaaagctatggaacctatggacagcccactgatgtcagctatacccaggctcagaccactgcaacctatgggcagaccgcctatgcaacttcttatggacagcctcccactggttatactactccaactgccccccaggcatacagccagcctgtccaggggtatggcactggtgcttatgataccaccactgctacagtcaccaccacccaggcctcctatgcagctcagtctgcatatggcactcagcctgcttatccagcctatgggcagcagccagcagccactgcacctacaagaccgcaggatggaaacaagcccactgagactagtcaacctcaatctagcacagggggttacaaccagcccagcctaggatatggacagagtaactacagttatccccaggtacctgggagctaccccatgcagccagtcactgcacctccatcctaccctcctaccagctattcctctacacagccgactagttatgatcagagcagttactctcagcagaacacctatgggcaaccgagcagctatggacagcagagtagctatggtcaacaaagcagctatgggcagcagcctcccactagttacccaccccaaactggatcctacagccaagctccaagtcaatatagccaacagagcagcagctacgggcagcagagtcctccccttggaggggcacaaacgatcagtaagaatacagagcaacggccccagccagatccgtatcagatcctgggcccgaccagcagtcgcctagccaaccctggaagcgggcagatccagctgtggcaattcctcctggagctgctctccgacagcgccaacgccagctgtatcacctgggaggggaccaacggggagttcaaaatgacggaccccgatgaggtggccaggcgctgggggcagcggaaaagcaagcccaacatgaattacgacaagctgagccgggccctccgttattactatgataaaaacattatgaccaaagtgcacggcaaaagatatgcttacaaatttgacttccacggcattgcccaggctctgcagccacatccgaccgagtcgtccatgtacaagtacccttctgacatctcctacatgccttcctaccatgcccaccagcagaaggtgaactttgtccctccccatccatcctccatgcctgtcacttcctccagcttctttggagccgcatcacaatactggacctcccccacggggggaatctaccccaaccccaacgtcccccgccatcctaacacccacgtgccttcacacttaggcagctactactag

SEQ ID NO: 148 - protein, 154 aa, Homo sapiens
MDLPYYHGRLTKQDCETLLLKEGVDGNFLLRDSESIPGVLCLCVSFKNIVYTYRIFREKHGYYRIQPIKRTSPSLRWRGSKLELEAFMTAEGSPKQVFPSLKELISKFEKPNQGMVVHLLKPIKRTSPSLRWRGLKLELETFVNSNSDYVDVLP

SEQ ID NO: 149 - DNA, 465 bp, Homo sapiens
atggatctgccttactaccatggacgtctgaccaagcaagactgtgagaccttgctgctcaaggaaggggtggatggcaactttcttttaagagacagcgagtcgataccaggagtcctgtgcctctgtgtctcgtttaaaaatattgtctacacataccgaatcttcagagagaaacacgggtattacaggatacagccaataaagagaaccagccccagcttgagatggagaggatcgaaattagagttggaagcatttatgactgcagaaggttctccaaaacaggtctttccaagcctaaaggaactgatctccaaatttgaaaaaccaaatcaggggatggtggttcaccttttaaagccaataaagagaaccagccccagcttgagatggagaggattgaaattagagttggaaacatttgtgaacagtaacagcgattatgtggatgtcttgccttga

SEQ ID NO: 150 - protein, 132 aa, Homo sapiens
MDLPYYHGRLTKQDCETLLLKEGVDGNFLLRDSESIPGVLCLCVSFKNIVYTYRIFREKHGYYRIQTAEGSPKQVFPSLKELISKFEKPNQGMVVHLLKPIKRTSPSLRWRGLKLELETFVNSNSDYVDVLP

SEQ ID NO: 151 - DNA, 420 bp, Homo sapiens
atggatctgccttactaccatggacgtctgaccaagcaagactgtgagaccttgctgctcaaggaaggggtggatggcaactttcttttaagagacagcgagtcgataccaggagtcctgtgcctctgtgtctcgtttaaaaatattgtctacacataccgaatcttcagagagaaacacgggtattacaggatacagactgcagaaggttctccaaaacaggtctttccaagcctaaaggaactgatctccaaatttgaaaaaccaaatcaggggatggtggttcaccttttaaagccaataaagagaaccagccccagcttgagatggagaggattgaaattagagttggaaacatttgtgaacagtaacagcgattatgtggatgtcttgccttgaagataaggctgccggacaaag

SEQ ID NO: 152 - protein, 45 aa, Homo sapiens [sequence omitted]

SEQ ID NO: 153 - DNA, 136 bp, Homo sapiens
atggatctgccttactaccatggacgtctgaccaagcaagactgtgagaccttgctgctcaaggaaggggtggatggcaactttcttttaagagacagcgagtcgataccaggagtcctgtgcctctgtgtctcgt

SEQ ID NO: 154 - protein, 132 aa, Mus musculus
MDLPYYHGCLTKRECEALLLKGGVDGNFLIRDSESVPGALCLCVSFKKLVYSYRIFREKHGYYRIETDAHTPRTIFPNLQELVSKYGKPGQGLVVHLSNPIMRNNLCQRGRRMELELNVYENTDEEYVDVLP

SEQ ID NO: 155 - DNA, 399 bp, Mus musculus
atggatctgccttactaccatggctgcctgaccaagcgagagtgtgaagccctgctcctcaagggaggtgtggatggcaactttctgataagagacagcgagtctgtgccaggagccctgtgcctctgtgtctcgtttaaaaagcttgtctacagctaccgaatcttcagagagaaacatggatattacaggatagagactgatgctcatactccaagaacgatctttccaaacctacaggaattggtctccaaatatggaaaaccgggtcaaggattggtggttcacctttcaaacccaataatgagaaacaacctatgccaaagagggagaagaatggagttagagctgaatgtttatgagaacactgatgaggagtatgtggacgtcttgccttga

SEQ ID NO: 156 - protein, 76 aa, Homo sapiens
PTSYPPQTGSYSQAPSQYSQQSSSYGQQNPYQILGPTSSRLANPGSGQIQLWQFLLELLSDSANASCITWEGTNGE

SEQ ID NO: 157 - DNA, 229 bp, Homo sapiens
cccactagttacccaccccaaactggatcctacagccaagctccaagtcaatatagccaacagagcagcagctacgggcagcagaatccgtatcagatcctgggcccgaccagcagtcgcctagccaaccctggaagcgggcagatccagctgtggcaattcctcctggagctgctctccgacagcgccaacgccagctgtatcacctgggaggggaccaacggggagt

SEQ ID NO: 158 - DNA, 100 bp, Homo sapiens
tacgggcagcagagttcactgctggcctataatacaacctcccacaccgaccaatcctcacgattgagtgtcaaagaagacccttcttatgactcagtca

SEQ ID NO: 159 - protein, 20 aa, Homo sapiens
SQQSSSYGQQSPPLGGAQTI

SEQ ID NO: 160 - DNA, 60 bp, Homo sapiens
agccaacagagcagcagctacgggcagcagagtcctccccttggaggggcacaaacgatc

SEQ ID NO: 161 - DNA, 447 bp, Homo sapiens
agatagagctggagacctacaaactgaagtgcaaggcactgcaggaggagaaccgcgacctgcgcaaagccagcgttaccatcatactggagaacaggccatctgttctgtttctacctgtcccctggaggctgcccagaaaccggccctcgctggactccatggagaaccaggtctccgtggatgccttcaagatcctggaggatccaaagtgggaattccctcggaagaacttggttcttggaaaaactctaggagaaggcgaatttggaaaagtggtcaaggcaacggccttccatctgaaaggcagagcagggtacaccacggtggccgtgaagatgctgaaagagaacgcctccccgagtgagcttcgagacctgctgtcagagttcaacgtcctgaagcaggtcaaccacccacatgtcatcaaattgtatggggcctgca

SEQ ID NO: 162 - protein, 585 aa, Homo sapiens
MADSASESDTDGAGGNSSSSAAMQSSCSSTSGGGGGGGGGGGGGKSGGIVISPFRLEELTNRLASLQQENKVLKIELETYKLKCKALQEENRDLRKASVTIQARAEQEEEFISNTLFKKIQALQKEKETLAVNYEKEEEFLTNELSRKLMQLQHEKGELEQHLEQEQEFQVNKLMKKIKKLENDTISKQLTLEQLRREKIDLENTLEQEQEALVNRLWKRMDKLEAETRILQEKLDQPVSAPPSPRDISMEIDSPENMMRHIRFLKNEVERLKKQLRAAQLQHSEKMAQYLEEERHMREENLRLQRKLQREMERREALCRQLSESESSLEMDDERYFNEMSAQGLRPRTVSSPIPYTPSPSSSRPISPGLSYASHTVGFTPPTSLTRAGMSYYNSPGLHVQHMGTSHGITRPSPRRSNSPDKFKRPTPPPSPNTQTPVQPPPPPPPPPMQPTVPSGSHLAAYSFATFGAHLLPALMHELSLNFKLGLIQWSRLLNAKGSFSGIFGYDLFALRLSRLHYPLCCKCLSEMQPVLWVYNTNQTTFSISVLLESSCTSIPWLEPSLFGIWYFSSSVQFLLGPELHSPGF

SEQ ID NO: 163 - DNA, 3011 bp, Homo sapiens
ctgctgctcctcctcctttcccagcccgccgcggccatggcggacagcgccagcgagagcgacacggacggggcggggggcaacagcagcagctcggccgccatgcagtcgtcctgctcgtcgacctcgggcggcggcggtggcggcgggggaggcggcggcggtgggaagtcggggggcattgtcatctcgccgttccgcctggaggagctcaccaaccgcctggcctcgctgcagcaagagaacaaggtgctgaagatagagctggagacctacaaactgaagtgcaaggcactgcaggaggagaaccgcgacctgcgcaaagccagcgttaccatccaagccagggctgagcaggaagaagaattcattagtaacactttattcaagaaaattcaggctttgcagaaggagaaagaaacccttgctgtaaattatgagaaagaagaagaattcctcactaatgagctctccagaaaattgatgcagttgcagcatgagaaaggcgaactagaacagcatcttgaacaagagcaggaatttcaggtcaacaaactgatgaagaaaattaaaaaactggagaatgacaccatttctaagcaacttacattagaacagttgagacgggagaagattgaccttgaaaatacattggaacaagaacaagaagcactagttaatcgcctctggaaaaggatggataagcttgaagctgaaacgcgaatcctgcaggaaaaattagaccagcccgtctctgctccaccatcgcctagagatatctccatggagattgattctccagaaaatatgatgcgtcacatcaggtttttaaagaatgaagtggaacggctgaagaagcaactgagagctgctcagttacagcattcagagaaaatggcacagtatctggaggaggaacgtcacatgagagaagagaacttgaggctccagaggaagctgcagagggagatggagagacgagaagccctctgtcgacagctctccgagagtgagtccagcttagaaatggacgacgaaaggtattttaatgagatgtctgcacaaggattaagacctcgaactgtgtccagcccgatcccttacacaccttctccgagttcaagcaggcctatatcacctggtctatcatatgcaagtcacacggttggtttcacgccaccaacttcactgactagagctggaatgtcttattacaattccccgggtcttcacgtgcagcacatgggaacatcccatggtatcacaaggccttcaccacggagaagcaacagtcctgacaaattcaaacggcccacgccgcctccatctcccaacacacagaccccagtccagccacctccacctccacctccgccacccatgcagcccacggtcccctcaggcagccacctcgcagcctactccttcgcaacattcggcgcacacctcctcccagccttaatgcatgagcttagtctgaatttcaagttgggactcatccaatggagccgtctactcaacgccaaaggttccttctctggcatatttggatatgacttatttgcactgaggttatctaggcttcactatccattgtgttgtaaatgtttgtcagaaatgcagccagtgttgtgggtctacaacactaaccagacgactttttccatcagtgttttacttgaatcttcatgtacgtccattccctggctggaaccttcgctgtttggtatttggtatttcagcagcagtgtgcaatttttgcttggcccagagcttcattctcctggcttttaggtttgtaaaagaaaaagggatatcttttttatatttttttccatgaatctgcagaaaataactaagctgttgtaaccctcctataattataatagtgtttacaaacaataccaataattcagcactacaattcagacctttgaaaatctggctttcagtgtagaacagaaagttagatgaatcagtgcccaagacatatttcctgtttaacagaactttctacagatacattttttacaggttattttcattgtgttattgacatccatgtctctcgtaaacagaggtcccaaagtaatgaatcatgtggcgtaccttctccacataaatggatggataattacgtatattaagatgtgattctcttttttatccttaatgttaatctacttaacctggccccctctaacatgagtcgataaatgttgtcctactcaccggtggtttcaatggctaattagaatgtgttatttgatttctgctgcagaaggcagtgtgattgtaacaaaaacaatgcggcttccccctttcgtacttcatttgtgttctcttaaaatagagtttgaacaaatattttaaaggtgcaaaataccattagaaaatactatttgaaatggacattatcgcattatcttggcataatggccagaaaatattgtattgcttggcagaaaagaaaataaggtctaaaggaaagtagcacattagcattgatggctgttcatttcacccagtataagcaagtgtacaaagaagtatattctgaatacattatttccattcatttagcacaaataaatcatttggtttcactttgcagtggaacactgagtcactcttttcttaatacgtgcaacatcttaatttttgtttttcagcagttgctgttttgtactttggtagtgaagtgatttttaccacctgtgtttgcatatttatatatgctgtggatgaaaataacttactagagaatgtatattttatgacaagaatgtgtatctgttgggatataatcagagaactgaaaagtaatttatcagtaatttttaagagtccatgttttgtgacaaccatctctaatagccaactctttattaaacacactcctaaaaataaggaaccatgacgattgtagatatttaatattgtacagtatagaaacctccgatttttgccttcgaatgcagtatttaagagttaacagaaaaaaaaaaaaa

SEQ ID NO: 164 - DNA, 447 bp, Homo sapiens
gatcagggggctcggaggccctcccttggaacacgtgtggctggcgagctggtggtgcgggggcagtccttggctttcccgcacccgcagtgcctgcgcgttcccagcccgcccgtggtcaccagacggcggcgggcgggtcccggagctttcagccagctttgctgggcggcctagggagcgcgcccagcccggctggagcgagccccagtgcaatactgcccaagcccgggcggggtctctgttctctggcagaggaggtcccttggcagcgggaggcgccctctctttctctcgccgccgctccgagtctgcgccctggtgccaggcgctcagctcggcgctcccctgtgctcgcccggcgcccactcattcgcagcccggccttcgtcgccgccgcctccctgctgctcctcctcctttccccagcccgccgcggccatggcg

SEQ ID NO: 165 - protein, 585 aa, Homo sapiens; identical to SEQ ID NO: 162

SEQ ID NO: 166 - DNA, 3011 bp, Homo sapiens; identical to SEQ ID NO: 163

SEQ ID NO: 167 - DNA, 808 bp, Homo sapiens
agatcttcactgaccatggttgattttgcagcatttgggattttgacagctgtagccatggcagtgtcgacactgaccttgactgtgggttcccagggaatgtggggccagaccaggacagcccaggagcaggagacctggggtgacggatgcccagagctggcacatcaagggagggttcctggatcatggcaggctttggctccctggtcagagttcaagtactgggggccagggtgggggtctcggaaggcatcccgagcagtcccaagtgggccccaatgtgtggatagaactttggtggagggcagggtggtagtgccagcagcagggtgagcgggtgcgtgagggccagtgcagcccttgaggagcagtgattccacactctgaggcggaacatggtggcgcctttctttgcaggggtggctatgtagagaagttgtcctggacacttccactgtagtcggaggtcctgggctgggcctggtgctcatttagtcctggggcaggggtcaggggagacagtagaccaggaaccagagagggtcgaagtactgagtccaagccatgctgtgaccacacctgtcatgtagcagctttcaggggcctggctgtggggtcccgcccagggcagagacaggcaggttcggctggctcagatgacagccggttctctgcacattggaacttgtccatggggcctcctttaagggtcttgccttcttcctcccctgtcatcctcacacttttcccccctcttctcccccttccctcatttccaacataggaggatccaaagtgggaattc

SEQ ID NO: 168 - protein, 271 aa, Homo sapiens
MEDSHKSTTSETAPQPGSAVQGAHISHIAQQVSSLSESEESQDSSDSIGSSQKAHGILARRPSYRKILKDLSSEDTRGRKGDGENSGVSAAVTSMSVPTPIYQTSSGQYIAIAPNGALQLASPGTDGVQGLQTLTMTNSGSTQQGTTILQYAQTSDGQQILVPSNQVVVQTASGDMQTYQIRTTPSATSLPQTVVMTSPVTLTSQTTKTDDPQLKREIRLMKNREAARECRRKKKEYVKCLENRVAVLENQNKTLIEELKTLKDLYSNKSV

SEQ ID NO: 169 - DNA, 816 bp, Homo sapiens
atggaagattcccacaagagtaccacgtcagagacagcacctcaacctggttcagcagttcagggagctcacatttctcatattgctcaacaggtatcatctttatcagaaagtgaggagtcccaggactcatccgacagcataggctcctcacagaaagcccacgggatcctagcacggcgcccatcttacagaaaaattttgaaagacttatcttctgaagatacacggggcagaaaaggagacggagaaaattctggagtttctgctgctgtcacttctatgtctgttccaactcccatctatcagactagcagcggacagtacattgccattgccccaaatggagccttacagttggcaagtccaggcacagatggagtacagggacttcagacattaaccatgacaaattcaggcagtactcagcaaggtacaactattcttcagtatgcacagacctctgatggacagcagatacttgtgcccagcaatcaggtggtcgtacaaactgcatcaggagatatgcaaacatatcagatccgaactacaccttcagctacttctctgccacaaactgtggtgatgacatctcctgtgactctcacctctcagacaactaagacagatgacccccaattgaaaagagaaataaggttaatgaaaaacagagaagctgctcgagaatgtcgcagaaagaagaaagaatatgtgaaatgcctggaaaaccgagttgcagtcctggaaaatcaaaataaaactctaatagaagagttaaaaactttgaaggatctttattccaataaaagtgtttga

SEQ ID NO: 170 - protein, 117 aa, Homo sapiens
TGSYSQAPSQYSQQSSSYGQQIAIAPNGALQLASPGTDGVQGLQTLTMTNSGSTQQGTTILQYAQTSDGQQILVPSNQVVVQTASGDMPTYQIRTTPSATSLPQTVVMTSPVTLTSQ

SEQ ID NO: 171 - DNA, 353 bp, Homo sapiens
aactggatcctacagccaagctccaagtcaatatagccaacagagcagcagctacgggcagcagattgccattgccccaaatggagccttacagttggcaagtccaggcacagatggagtacagggacttcagacattaaccatgacaaattcaggcagtactcagcaaggtacaactattcttcagtatgcacagacctctgatggacagcagatacttgtgcccagcaatcaggtggtcgtacaaactgcatcaggagatatgccaacatatcagatccgaactacaccttcagctacttctctgccacaaactgtggtgatgacatctcctgtgactctcacctctcaga

SEQ ID NO: 172 - DNA, 500 bp, Homo sapiens
taagtgccacggagaaagctaaagcagagaaaggaatggagaatgttcaggatggaggtcagagtgttacatcaggtggtcaggaattaccttaggtaattcctccactccaaacccttcagtgacttccatgacatgaaataggaagtcattggagggtttgagcagaggaatgacctgttttaaaaggctcactcaggctgctgtatggtgaatagagttgcgaacagaggccataggataacagggttttgttgagaaagtggtttcattttgagggctaggtggaaagacctgaggttgtaaccagtagtggagagggaaggaaaattaactcagggggagtgaatctgtagacccacttgagataagatactcgctgggttaggtaggaggggcagataggatatctaggcttggagaggctggtaactcaaatataatggatacttaatttttttttttttttttgcaggggtgagcacagacaggatcgcagg

SEQ ID NO: 173 - DNA, 521 bp, Homo sapiens
cccctaaaccagatggcccaggagggggaccaggtggctctcacatgggtaagaaaggcagacctggtgctagggagctgggaccaaagaatccttaatttttcagcggggaggctcggggaacataggggaatgggaatatgatagatcttgtttcttttgtcctagggggtaactacggggatgatcgtcgtggtggcagaggaggctatgatcgaggcggctaccggggccgcggcggggaccgtggaggcttccgagggggccggggtggtggggacagaggtggctttggccctggcaagatggattccagaccttctgcagtcagaaagtttctgcagtaatttagagatggtagtgaattgatctagattggaaacaatggaattagaagtgtttagattcttctaagcaaaggttttaaaaactcatttttaaagaatgagttaagggccgggcatggtggctcacacctgtaatcccagcactttgggagaccagaggtgggtggatcacct

SEQ ID NO: 174 - protein, 75 aa, Homo sapiens
YSQQSSQPYGQQSYSGYSQSTDTSGYGQSSYSSYGQSQNMFKKEVYLHTSPHLKADVLFQTDPTAEMAAESLPFS

SEQ ID NO: 175 - DNA, 225 bp, Homo sapiens
tattcccagcagagcagtcagccctacggacagcagagttacagtggttatagccagtccacggacacttcaggctatggccagagcagctattcttcttatggccagagccagaacatgttcaagaaggaagtgtatcttcatacatcaccacacctgaaagcagatgtgcttttccagactgatccaactgcagagatggcagctgagtcattgcctttctcc

SEQ ID NO: 176 - protein, 78 aa, Homo sapiens
GDWKCPNPTCENMNFSWRNECNQCKAPKPDGPGGGPGGSHMGVFKKEVYLHTSPHLKADVLFQTDPTAEMAAESLPFS

SEQ ID NO: 177 - DNA, 235 bp, Homo sapiens
tggtgactggaagtgtcctaatcccacctgtgagaatatgaacttctcttggaggaatgaatgcaaccagtgtaaggcccctaaaccagatggcccaggagggggaccaggtggctctcacatgggggtgttcaagaaggaagtgtatcttcatacatcaccacacctgaaagcagatgtgcttttccagactgatccaactgcagagatggcagctgagtcattgcctttctcc

SEQ ID NO: 178 - protein, 526 aa, Homo sapiens
MASNDYTQQATQSYGAYPTQPGQGYSQQSSQPYGQQSYSGYSQSTDTSGYGQSSYSSYGQSQNTGYGTQSTPQGYGSTGGYGSSQSSQSSYGQQSSYPGYGQQPAPSSTSGSYGSSSQSSSYGQPQSGSYSQQPSYGGQQQSYGQQQSYNPPQGYGQQNQYNSSSGGGGGGGGGGNYGQDQSSMSSGGGSGGGYGNQDQSGGGGSGGYGQQDRGGRGRGGSGGGGGGGGGGYNRSSGGYEPRGRGGGRGGRGGMGGSDRGGFNKFGGPRDQGSRHDSEQDNSDNNTIFVQGLGENVTIESVADYFKQIGIIKTNKKTGQPMINLYTDRETGKLKGEATVSFDDPPSAKAAIDWFDGKEFSGNPIKVSFATRRADFNRGGGNGRGGRGRGGPMGRGGYGGGGSGGGGRGGFPSGGGGGGGQQRAGDWKCPNPTCENMNFSWRNECNQCKAPKPDGPGGGPGGSHMGGNYGDDRRGGRGGYDRGGYRGRGGDRGGFRGGRGGGDRGGFGPGKMDSRGEHRQDRRERPY

SEQ ID NO: 179 - DNA, 1824 bp, Homo sapiens
atgctcagtcctccaggcgtcggtgctcagcggtgttggaacttcgttgcttgcttgcctgtgcgcgcgtgcgcggacatggcctcaaacgattatacccaacaagcaacccaaagctatggggcctaccccacccagcccgggcagggctattcccagcagagcagtcagccctacggacagcagagttacagtggttatagccagtccacggacacttcaggctatggccagagcagctattcttcttatggccagagccagaacacaggctatggaactcagtcaactccccagggatatggctcgactggcggctatggcagtagccagagctcccaatcgtcttacgggcagcagtcctcctaccctggctatggccagcagccagctcccagcagcacctcgggaagttacggtagcagttctcagagcagcagctatgggcagccccagagtgggagctacagccagcagcctagctatggtggacagcagcaaagctatggacagcagcaaagctataatccccctcagggctatggacagcagaaccagtacaacagcagcagtggtggtggaggtggaggtggaggtggaggtaactatggccaagatcaatcctccatgagtagtggtggtggcagtggtggcggttatggcaatcaagaccagagtggtggaggtggcagcggtggctatggacagcaggaccgtggaggccgcggcaggggtggcagtggtggcggcggcggcggcggcggtggtggttacaaccgcagcagtggtggctatgaacccagaggtcgtggaggtggccgtggaggcagaggtggcatgggcggaagtgaccgtggtggcttcaataaatttggtggccctcgggaccaaggatcacgtcatgactccgaacaggataattcagacaacaacaccatctttgtgcaaggcctgggtgagaatgttacaattgagtctgtggctgattacttcaagcagattggtattattaagacaaacaagaaaacgggacagcccatgattaatttgtacacagacagggaaactggcaagctgaagggagaggcaacggtctcttttgatgacccaccttcagctaaagcagctattgactggtttgatggtaaagaattctccggaaatcctatcaaggtctcatttgctactcgccgggcagactttaatcggggtggtggcaatggtcgtggaggccgagggcgaggaggacccatgggccgtggaggctatggaggtggtggcagtggtggtggtggccgaggaggatttcccagtggaggtggtggcggtggaggacagcagcgagctggtgactggaagtgtcctaatcccacctgtgagaatatgaacttctcttggaggaatgaatgcaaccagtgtaaggcccctaaaccagatggcccaggagggggaccaggtggctctcacatggggggtaactacggggatgatcgtcgtggtggcagaggaggctatgatcgaggcggctaccggggccgcggcggggaccgtggaggcttccgagggggccggggtggtggggacagaggtggctttggccctggcaagatggattccaggggtgagcacagacaggatcgcagggagaggccgtattaattagcctggctccccaggttctggaacagctttttgtcctgtacccagtgttaccctcgttattttgtaaccttccaattcctgatcacccaagggttttttttgtgtcggactatgtaattgtaactatacctctggttcccattaaaagtgaccattttagtt

SEQ ID NO: 180 - protein, 195 aa, Homo sapiens
QSSQSSYGQQSSYPGYGQQPAPSSTSGSYGSSSQSSSYGQPQSGSYSQQPSYGGQQQSYGQQQSYNPPQGYGQQNQYNSSSGGGGGGGGGGNYGQDQSSMSSGGGSGGGYGNQDQSGGGGSGGYGQQDRGGRGRGGSGGGGAAAVVVTTAAVVAMNPEVVEVAVEAEVAWAEVTVVASINLVCSRRKCIFIHHHS

SEQ ID NO: 181 - DNA, 652 bp, Homo sapiens
cagagctcccaatcgtcttacgggcagcagtcctcctaccctggctatggccagcagccagctcccagcagcacctcgggaagttacggtagcagttctcagagcagcagctatgggcagccccagagtgggagctacagccagcagcctagctatggtggacagcagcaaagctatggacagcagcaaagctataatccccctcagggctatggacagcagaaccagtacaacagcagcagtggtggtggaggtggaggtggaggtggaggtaactatggccaagatcaatcctccatgagtagtggtggtggcagtggtggcggttatggcaatcaagaccagagtggtggaggtggcagcggtggctatggacagcaggaccgtggaggccgcggcaggggtggcagtggtggcggcggggcggcggcggtggtggttacaaccgcagcagtggtggctatgaacccagaggtcgtggaggtggccgtggaggcagaggtggcatgggcggaagtgaccgtggtggcttcaataaatttggtgtgttcaagaaggaagtgtatcttcatacatcaccactcctgaaagcagatgtgcttttccagactgatccaactgcagagatggcagctgagtcattgcctttctc

SEQ ID NO: 182 - protein, 462 aa, Homo sapiens
MASNDYTQQATQSYGAYPTQPGQGYSQQSSQPYGQQSYSGYSQSTDTSGYGQSSYSSYGQSQNTGYGTQSTPQGYGSTGGYGSSQSSQSSYGQQSSYPGYGQQPAPSSTSGSYGSSSQSSSYGQPQSGSYSQQPSYGGQQQSYGQQQSYNPPQGYGQQNQYNSSSGGGGGGGGGGNYGQDQSSMSSGGGSGGGYGNQDQSGGGGSGGYGQQDRGGRGRGGSGGGGGGGGGGYNRSSGGYEPRGRGGGRGGRGGMGGSDRGGFNKFGVFKKEVYLHTSPHLKADVLFQTDPTAEMAAESLPFSFGTLSSWELEAWYEDLQEVLSSDENGGTYVSPPGNEEEESKIFTTLDPASLAWLTEEEPEPAEVTSTSQSPHSPDSSQSSLAQEEEEEDQGRTRKRKQSGHSPARAGKQRMKEKEQENERKVAQLAEENERLKQEIERLTREVEATRRALIDRMVNLHQA

SEQ ID NO: 183 - DNA, 1678 bp, Homo sapiens
gcggccgctgtcggtgctcagcggtgttggaacttcgttgcttgcttgcctgtgcgcgcgtgcgcggacatggcctcaaacgattatacccaacaagcaacccaaagctatggggcctaccccacccagcccgggcagggctattcccagcagagcagtcagccctacggacagcagagttacagtggttatagccagtccacggacacttcaggctatggccagagcagctattcttcttatggccagagccagaacacaggctatggaactcagtcaactccccagggatatggctcgactggcggctatggcagtagccagagctcccaatcgtcttacgggcagcagtcctcctaccctggctatggccagcagccagctcccagcagcacctcgggaagttacggtagcagttctcagagcagcagctatgggcagccccagagtgggagctacagccagcagcctagctatggtggacagcagcaaagctatggacagcagcaaagctataatccccctcagggctatggacagcagaaccagtacaacagcagcagtggtggtggaggtggaggtggaggtggaggtaactatggccaagatcaatcctccatgagtagtggtggtggcagtggtggcggttatggcaatcaagaccagagtggtggaggtggcagcggtggctatggacagcaggaccgtggaggccgcggcaggggtggcagtggtggcggcggcggcggcggcggtggtggttacaaccgcagcagtggtggctatgaacccagaggtcgtggaggtggccgtggaggcagaggtggcatgggcggaagtgaccgtggtggcttcaataaatttggtgtgttcaagaaggaagtgtatcttcatacatcaccacacctgaaagcagatgtgcttttccagactgatccaactgcagagatggcagctgagtcattgcctttctccttcgggacactgtccagctgggagctggaagcctggtatgaggacctgcaagaggtcctgtcttcagatgaaaatgggggtacctatgtttcacctcctggaaatgaagaggaagaatcaaaaatcttcaccactcttgaccctgcttctctggcttggctgactgaggaggagccagaaccagcagaggtcacaagcacctcccagagccctcactctccagattccagtcagagctccctggctcaggaggaagaggaggaagaccaagggagaaccaggaaacggaaacagagtggtcattccccagcccgggctggaaagcagcgcatgaaggagaaagaacaggagaatgaaaggaaagtggcacagctagctgaagagaatgaacggctcaagcaggaaatcgagcgcctgaccagggaagtagaggcgactcgccgagctctgattgaccgaatggtgaatctgcaccaagcatgaacaattgggagcatcagtcccccacttgggccacactacccacctttcccagaagtggctactgactaccctctcactagtgccaatgatgtgaccctcaatcccacatacgcagggggaaggcttggagtagacaaaaggaaaggtctcagcttgtatatagagattgtacatttatttattactgtccctatctattaaagtgactttctatgaaaaa

SEQ ID NO: 184 - protein, 525 aa, Homo sapiens
MASNDYTQQATQSYGAYPTQPGQGYSQQSSQPYGQQSYSGYSQSTDTSGYGQSSYSSYGQSQNSYGTQSTPQGYGSTGGYGSSQSSQSSYGQQSSYPGYGQQPAPSSTSGSYGSSSQSSSYGQPQSGSYSQQPSYGGQQQSYGQQQSYNPPQGYGQQNQYNSSSGGGGGGGGGGNYGQDQSSMSSGGGSGGGYGNQDQSGGGGSGGYGQQDRGGRGRGGSGGGGGGGGGGYNRSSGGYEPRGRGGGRGGRGGMGGSDRGGFNKFGGPRDQGSRHDSEQDNSDNNTIFVQGLGENVTIESVADYFKQIGIIKTNKKTGQPMINLYTDRETGKLKGEATVSFDDPPSAKAAIDWFDGKEFSGNPIKVSFATRRADFNRGGGNGRGGRGRGGPMGRGGYGGGGSGGGGRGGFPSGGGGGGGQQRAGDWKCPNPTCENMNFSWRNECNQCKAPKPDGPGGGPGGSHMGGNYGDDRRGGRGGYDRGGYRGRGGDRGGFRGGRGGGDRGGFGPGKMDSRGEHRQDRRERPY

SEQ ID NO: 185 - DNA, 1822 bp, Homo sapiens
gcggccgctggcgtcggtgctcagcggtgttggaacttcgttgcttgcttgcctgtgcgcgcgtgcgcggacatggcctcaaacgattatacccaacaagcaacccaaagctatggggcctaccccacccagcccgggcagggctattcccagcagagcagtcagccctacggacagcagagttacagtggttatagccagtccacggacacttcaggctatggccagagcagctattcttcttatggccagagccagaacagctatggaactcagtcaactccccagggatatggctcgactggcggctatggcagtagccagagctcccaatcgtcttacgggcagcagtcctcctatcctggctatggccagcagccagctcccagcagcacctcgggaagttacggtagcagttctcagagcagcagctatgggcagccccagagtgggagctacagccagcagcctagctatggtggacagcagcaaagctatggacagcagcaaagctataatccccctcagggctatggacagcagaaccagtacaacagcagcagtggtggtggaggtggaggtggaggtggaggtaactatggccaagatcaatcctccatgagtagtggtggtggcagtggtggcggttatggcaatcaagaccagagtggtggaggtggcagcggtggctatggacagcaggaccgtggaggccgcggcaggggtggcagtggtggcggcggcggcggcggcggtggtggttacaaccgcagcagtggtggctatgaacccagaggtcgtggaggtggccgtggaggcagaggtggcatgggcggaagtgaccgtggtggcttcaataaatttggtggccctcgggaccaaggatcacgtcatgactccgaacaggataattcagacaacaacaccatctttgtgcaaggcctgggtgagaatgttacaattgagtctgtggctgattacttcaagcagattggtattattaagacaaacaagaaaacgggacagcccatgattaatttgtacacagacagggaaactggcaagctgaagggagaggcaacggtctcttttgatgacccaccttcagctaaagcagctattgactggtttgatggtaaagaattctccggaaatcctatcaaggtctcatttgctactcgccgggcagactttaatcggggtggtggcaatggtcgtggaggccgagggcgaggaggacccatgggccgtggaggctatggaggtggtggcagtggtggtggtggccgaggaggatttcccagtggaggtggtggcggtggaggacagcagcgagctggtgactggaagtgtcctaatcccacctgtgagaatatgaacttctcttggaggaatgaatgcaaccagtgtaaggcccctaaaccagatggcccaggagggggaccaggtggctctcacatggggggtaactacggggatgatcgtcgtggtggcagaggaggctatgatcgaggcggctaccggggccgcggcggggaccgtggaggcttccgagggggccggggtggtggggacagaggtggctttggccctggcaagatggattccaggggtgagcacagacaggatcgcagggagaggccgtattaattagcctggctccccaggttctggaacagctttttgtcctgtacccagtgttaccctcgttattttgtaaccttccaattcctgatcacccaagggtttttttgtgtcggactatgtaattgtaactatacctctggttcccattaaaagtgaccattttagttaaaaaaaa

SEQ ID NO: 186 - DNA, 120 bp, Homo sapiens
tggtttctaaagatgaaattaagaattgttccacaagggttaagtgtctggtggtaaagttgggctcggaggcctacagtaacccaaatataagtgccacggagaaagctaaagcagaga

SEQ ID NO: 187 - DNA, 118 bp, Homo sapiens
tgagtgtgtgggagacaactccgaatgtttaattctggaagagggatgtaacattgccctgaggattcgagatggtagtgaattgatctagattggaaacaatggaattagaagtgtt

SEQ ID NO: 188 - DNA, 120 bp, Homo sapiens
gtgtgggagacaactccgaatgtttaattctggaagagggatgtaacattgccctgaggatggtggctcacacctgtaatcccagcactttgggagaccagaggtgggtggatcaccctg

SEQ ID NO: 189 - protein, 126 aa, Homo sapiens
QSSQSSYGQQSSYPGYGQQPAPSSTSGSYGSSSQSSSYGQPQSGSYSQQPSYGGQQQSYGQQQSYNPPQGYGQQNQYNSSSGGGGGGGGGVFKKEVYLHTSPLLKADVLFQTDPTAEMAAESLPFS

SEQ ID NO: 190 - DNA, 377 bp, Homo sapiens
cagagctcccaatcgtcttacgggcagcagtcctcctaccctggctatggccagcagccagctcccagcagcacctcgggaagttacggtagcagttctcagagcagcagctatgggcagccccagagtgggagctacagccagcagcctagctatggtggacagcagcaaagctatggacagcagcaaagctataatccccctcagggctatggacagcagaaccagtacaacagcagcagtggtggtggaggtggaggtggaggtggagtgttcaagaaggaagtgtatcttcatacatcaccactcctgaaagcagatgtgcttttccagactgatccaactgcagagatggcagctgagtcattgcctttctc

SEQ ID NO: 191 - protein, 689 aa, Homo sapiens
PSVSSISRILRSKFGKGEEEEADLERKEAEESEKKAKHSIDGILSERASAPQSDEGSDIDSEPDLPLKRKQRRSRTTFTAEQLEELEHVAFERTHYPDIYTREELAQRAKLTEARVQVWFSNRRARWRKQAGANQLMAFNHLIPGGFPPTAMPTLPTYQLSEHSYQPTSIPQAVSDPSSTVHRPQPLPPSTVHQSTIPSNPDSSSAYCLPSTRHGFSSYTDSFVPPSGPSNPMNPTIGNGLSPQNSIRHNLSLHSKFIRVQNEGTGKSSWWMLNPEGGKSGKSPRRRAASMDNNSKFAKSRSRAAKKKASLQSGQEGAGDSPGSQFSKWPASPGSHSNDDFDNWSTFRPRTSSNASTISGRLSPIMTEQDDLGEGDVHSMVYPPSAAKMASTLPSLSEISNPENMENLLDNLNLLSSPTSLTVSTQSSPGTMMQQTPCYSFAPPNTSLNSPSPNYQKYTYGQSSMSPLPQMPIQTLQDNKSSYGGMSQYNCAPGLLKELLTSDSPPHNDIMTPVDPGVAQPNSRVLGQNVMMGPNSVMSTYGSQASHNKMMNPSSHTHPGHAQQTSAVNGRPLPHTVSTMPHTSGMNRLTQVKTPVQVPLPHPMQMSALGGYSSVSSCNGYGRMGLLHQEKLPSDLDGMFIERLDCDMESIIRNDLMDGDTLDFNFDNVLPNQSFPHSVKTTTHSWVSG

SEQ ID NO: 192 - DNA, 3517 bp, Homo sapiens
ccgtcagtgagttccatcagccgcatcctgagaagtaaattcgggaaaggtgaagaggaggaggccgacttggagaggaaggaggcagaggaaagcgagaagaaggccaaacacagcatcgacggcatcctgagcgagcgagcctcagcaccccaatcagatgaaggctctgatattgactctgaaccagatttaccactaaagaggaaacagcgcagaagccgaaccaccttcacagcagaacagctggaggaactggagcacgttgcttttgagagaactcattaccctgacatttatactagggaggaactggcccagagggcgaagctcaccgaggcccgagtacaggtctggtttagcaaccgccgtgcaagatggaggaagcaagctggggccaatcaactgatggctttcaaccatctcattcccgggggattccctcccactgccatgccgaccttgccaacgtaccagctgtcggagcactcttaccagcccacatctattccacaagctgtgtcagatcccagcagcaccgttcacagacctcaaccgcttcctccaagcactgtacaccaaagcacgattccttccaacccagacagcagctctgcctactgcctccccagcaccaggcatggattttccagctatacagacagctttgtgcctccgtcggggccctccaaccccatgaaccccaccattggcaatggcctctcacctcagaattcaattcgtcataatctgtccctacacagcaagttcattcgtgtgcagaatgaaggaactggaaaaagttcttggtggatgctcaatccagagggtggcaagagcgggaaatctcctaggagaagagctgcatccatggacaacaacagtaaatttgctaagagccgaagccgagctgccaagaagaaagcatctctccagtctggccaggagggtgctggggacagccctggatcacagttttccaaatggcctgcaagccctggctctcacagcaatgatgactttgataactggagtacatttcgccctcgaactagctcaaatgctagtactattagtgggagactctcacccattatgaccgaacaggatgatcttggagaaggggatgtgcattctatggtgtacccgccatctgccgcaaagatggcctctactttacccagtctgtctgagataagcaatcccgaaaacatggaaaatcttttggataatctcaaccttctctcatcaccaacatcattaactgtttcgacccagtcctcacctggcaccatgatgcagcagacgccgtgctactcgtttgcgccaccaaacaccagtttgaattcacccagcccaaactaccaaaaatatacatatggccaatccagcatgagccctttgccccagatgcctatacaaacacttcaggacaataagtcgagttatggaggtatgagtcagtataactgtgcgcctggactcttgaaggagttgctgacttctgactctcctccccataatgacattatgacaccagttgatcctggggtagcccagcccaacagccgggttctgggccagaacgtcatgatgggccctaattcggtcatgtcaacctatggcagccaggcatctcataacaaaatgatgaatcccagctcccatacccaccctggacatgctcagcagacatctgcagtcaacgggcgtcccctgccccacacggtaagcaccatgccccacacctcgggtatgaaccgcctgacccaagtgaagacacctgtacaagtgcctctgccccaccccatgcagatgagtgccctggggggctactcctccgtgagcagctgcaatggctatggcagaatgggccttctccaccaggagaagctcccaagtgacttggatggcatgttcattgagcgcttagactgtgacatggaatccatcattcggaatgacctcatggatggagatacattggattttaactttgacaatgtgttgcccaaccaaagcttcccacacagtgtcaagacaacgacacatagctgggtgtcaggctgagggttagtgagcaggttacacttaaaagtacttcagattgtctgacagcaggaactgagagaagcagtccaaagatgtctttcaccaactcccttttagttttcttggttaaaaaaaaaaacaaaaaaaaaaaccctccttttttcctttcgtcagacttggcagcaaagacatttttcctgtacaggatgtttgcccaatgtgtgcaggttatgtgctgctgtagataaggactgtgccattggaaatttcattacaatgaagtgccaaactcactacaccatataattgcagaaaagattttcagatcctggtgtgctttcaagttttgtatataagcagtagatacagattgtatttgtgtgtgtttttggtttttctaaatatccaattggtccaaggaaagtttatactctttttgtaatactgtgatgggcctcatgtcttgataagttaaacttttgtttgtactacctgttttctgcggaactgacggatcacaaagaactgaatctccattctgcatctccattgaacagccttggacctgttcacgttgccacagaattcacatgagaaccaagtagcctgttatcaatctgctaaattaatggacttgttaaacttttggaaaaaaaaagattaaatgccagctttgtacaggtcttttctatttttttttgtttattttgttatttgcaaatttgtacaaacatttaaatggttctaatttccagataaatgatttttgatgttattgttgggacttaagaacatttttggaatagatattgaactgtaataatgttttcttaaaactagagtctactttgttacatagtcagcttgtaaattttgtggaaccacaggtatttgggggcagcattcataattttcattttgtattctaactggattagtactaattttatacatgcttaactggtttgtacactttgggatgctacttagtgatgtttctgactaatcttaaatcattgtaattagtacttgcatattcaacgtttcaggccctggttgggcaggaaagtgatgtatagttatggacactttgcgtttcttatttaggataacttaatatgtttttatgtatgtattttaaagaaatttcactgcttctctgaactatgcgtactgcatagcatcaagtcttctctagagacctctgtagtcctgggaggcctcataatgtttgtagatacagaaagggagactgcatctaaagcaatggtcctttgtcaaacgagggattttgatccacttcaccattttgagttgagctttagcaaaagtttccctcataattctttgctcttgtttcagtccaggtggaggttggttttgtagttctgccttgaggaattatgtcaacactcatacttcatctcattctcccttctgccctgcagattagattacttagcac

SEQ ID NO: 193 - protein, 55 aa, Homo sapiens
PYGYDQSPFMCNKRAEDFQGNDLDNDPNRGNQVERPQMTFGRLQGISPKIMPKKP

SEQ ID NO: 194 - DNA, 165 bp, Homo sapiens
ccttatggatatgaccagtctcctttcatgtgtaataaacgggccgaagacttccaggggaatgatttggataatgaccctaaccgtgggaatcaggttgaacgtcctcagatgactttcggcaggctccagggaatctccccgaagatcatgcccaagaagcca

SEQ ID NO: 195 - protein, 188 aa, Homo sapiens
MNGDDAFARRPTVGAQIPEKIQKAFDDIAKYFSKEEWEKMKASEKIFYVYMKRKYEAMTKLGFKATLPPFMCNKRAEDFQGNDLDNDPNRGNQVERPQMTFGRLQGISPKIMPKKPAEEGNDSEEVPEASGPQNDGKELCPPGKPTTSEKIHERSGPKRGEHAWTHRLRERKQLVIYEEISDPEEDDE

SEQ ID NO: 196 - DNA, 766 bp, Homo sapiens
ctctctttcgattcttccatactcagagtacgcacggtctgattttctctttggattcttccaaaatcagagtcagactgctcccggtgccatgaacggagacgacgcctttgcaaggagacccacggttggtgctcaaataccagagaagatccaaaaggccttcgatgatattgccaaatacttctctaaggaagagtgggaaaagatgaaagcctcggagaaaatcttctatgtgtatatgaagagaaagtatgaggctatgactaaactaggtttcaaggccaccctcccacctttcatgtgtaataaacgggccgaagacttccaggggaatgatttggataatgaccctaaccgtgggaatcaggttgaacgtcctcagatgactttcggcaggctccagggaatctccccgaagatcatgcccaagaagccagcagaggaaggaaatgattcggaggaagtgccagaagcatctggcccacaaaatgatgggaaagagctgtgccccccgggaaaaccaactacctctgagaagattcacgagagatctggacccaaaaggggggaacatgcctggacccacagactgcgtgagagaaaacagctggtgatttatgaagagatcagcgaccctgaggaagatgacgagtaactcccctcagggatacgacacatgcccatgatgagaagcagaacgtggtgacctttcacgaacatgggcatggctgcggacccctcgtcatcaggtgcatagcaagtg

SEQ ID NO: 197 - DNA, 548 bp, Homo sapiens
tgaaaattcattgggtgattcctgtgtacaacgtaaaagttctgtcattaactgaatagccataaaaagcctttaaatctccgtaaagctacaaaaattcgtcgggcatgttggtgcacacctgtagtcccagctaccgaggaggctgaggtgggagaatcgcttgaacctggaaggtggaggttgtaatgagccaagattatgccactgcactccagcctgggcaacagagtgatactctgtctcaaaaaaaaaaaaatgtgtgtgtatatatatatgtgtgtatatatatacacacacatatatgtatatatatgcgtatgtatatatacacacatatgtgtatgtgcgtgtgtacacacacgtgtgtgtgcgtgcgtacacacacacgtgtgtgcgcgtgtgtatgtgtatatatgtgtgtatatatgtatatatgtgtgtatatatgtatatatgtatatgtgtatatatataatcttgccaaatactacaaattttataaatcgttcctttactggctgtttggtgatatatcttttatatgc

SEQ ID NO: 198 - DNA, 13589 bp, Homo sapiens
gtgagtgagttcccctctcgccgctccagcatcatggggacctgacaaagtcccactctcccctgtgatctttgcagccagcctcgcaccattcccaattaggcgccctccaaggctctctgagggcaattggaggcttctgcttggatgaggctaaatccctaatggcttggttaatgagccgctgggatggagtagttaatgagcctcagaaatgttaagaaacaaatgtcctacgtccagcttacaaggagagtcacatcagaatcaaggctaagcgaaaacatttaaaataaaaggtttatgagcatgctaatggccctgtcctgaagtttccagcagctaattaatgaccagacacagcataaagaagctttgtctcagattcaggcctgtaattccatcctgtgagcggtaacgccatgcagccttcaccttaggagcgggtaggagaggaaaacaggattatggtattggaggcaggtgttgctgggccatttggacagaggaaaccactcccagattctctttcatttattataagaagcccaaatttgcttacttaagggaagaaaccagtggaaaccagtgggaaaaatatctacacattgtctgtttcctaggatgctcataatttacatgaactcattcttcagaagcttaatcctctaaccatgtgacaaggttagctcttttcgtagagcatttctccattagatatttgttgagcacctgctgtgtacaaataaatgcattaggagtagggatacagagctagtttaacatgcaatatctttttccccaaggaatttagaatatagtgggagagacaaaggtgaaaaccactaagatataaggcagaatgaagtcagccccatttcccattcattttatgtaccagcattcattgagcacctactgtctgccagagtaataaagcgctgtagaagcaaagcagaaggaaggtgtgttttgactggagggaccaagcaaggctttgcaggggagagagcctgatactgaagtgactgtgctttcgatagtgggaaggaggcctggaggcaggagagaacggacctgttcagggaagggtgagaaatgccccctcctccctgagcccatgacccggtgagagctctagctgaccatcaaggtgctgccatgctgatggcagtggaagaacaggctcctacaagcctactttacttctgccttgaggtactgtcccttttttttttttttttccacactctgttgcccaggctggagtgcagtgacggaatctcggctcactgcaagctccgccccccgggttcacgtcattctcctgcctcggcctcctgagtagctgcgactacaggcgcccgccaccatgcccggctaatttttttcatatttttagtagagacggggtttcaccatgttagccaggatggtcttgatctcctgacctcgcgatccgcctgcgtcggcctcctaaagtgctaggattacaggcgtgagccaccgcgccyggccggtactgtcccttttttatttaaatcatgtatttctagatttttctctggccccaagtgcaccaccagtgttgtctcartttcactgttataaatcatttacatcagggatgttgaatcyagaaaataaaatggcaaacaaaaatgacttatatgttttaaaaactatgaaaaaggaaatgatatatgtttgggattccattcaaaacgatcctgcagagttagggggtgagatgtgggtggggcctacataaaacaaggctagccatcaccagctagtggctatatgtctgggtgatagatgcatgggggttaatattattgatctctctgcttttacctgtacattagattgttttaatcagaaaatgaaaaaataaaactggggaaaaaaagaatagtagataaagaagcaaagagcttgggcaaaacatgtgaatttccccaaataattggagaaggaggatgaggtcagtgtattgctgtgaattctataaatgacccatctcgtgctttccaggcaatacccttcttgtctgtataccctctcgtcttgtttcttgcatggtgtgtgcagcagacttgacattttgcagataccttttgcttgtttataattctcaggaccgctctttaaggtagctcatgactgcagtattcatcttatgtggaagggtcatttgtacaggggaaaccacagaggaaactgagccccagagaggcaaaggcctttgccaaggtcagataggggccccatgaccgaggtgtgcaggacaacccttgctgcccgtggctgctgtccatagtgctgccctcgtgggcctggcttgcttcccaagatctctcctgtctacctcccaggtgacactgccttcaccacttcttgggaatctaccataagcccatgaatcaagaaagacacatggtttagacttgaggcgttatttttcccttatttagtaggtttgtaaatttcaaaatattagtctcttaaaattatattacttttttttttgagacagagtctctgtcacccaggctgaagttcagtgatgcaatctcggctcattgcaacctctgcgtcctaggttcaagtgattctcgtgcctcagcctcctgagtagcagggattacaggcacacgccaccatgcctggcgaatttttttgtatttttagtaaagacggggtttcaccgtgttggccaggctggtcttgaactcctgacctcaagtgatctgcctgccttggcctcctaaattgctgggattacaggcatgaaccactgcacccagcctatactactatttttttcatctcattccccaatatcagtgtttgatgatggatgcggcctcatcggttaggaagcttggtggaatactgcacccaccaaatgatagcctgggtgtctatgggtgcccgctctctcaagggcacacagaaataggcaatatgtgcttttcttgatggctcttaggaagtcaagaatattcatgtaaaataaccctggggcctagatcttttgggggaatgcgttaactccttcagtataacacaatgtcctaaaactaattaccagtgctataatggcatattcaaaagtttttaaatctcccaatatatattttaactaatgcaaccaaatccaaatttaactcattccactgaaaggcattgtttttctccgaagaaggtaggactgaatcatccctaaagttccttccagctctgccagtctgtagtctgacagtcttgattctgtaaccctcccaagaaaacacaagagttttaagcacctttgtttctttgaggatacccctgtgtgtactccactcttctgatgtctttctggactcctcgatccttgtaaaattgattctgtttattggaggtgaaattcattgggtgattcctgtgtacaacgtaaaagttctgtcattaactgaatagccataaaaagcctttaaatctccgtaaagctacaaaaattcgtcgggcatgttggtgcacacctgtagtcccagctaccgaggaggctgaggtgggagaatcgcttggacctggaaggtggaggttgtaatgagccaagattatgccactgcactccagcctgggcaacagagtgatactctgtctcaaaaaaaaaaaatgtgtgtgtatatatatatgtgtgtatatatatacacacacatatatgtatatatatgcgtatgtatatatacacacatatgtgtatgtgcgtgtgtacacacacgtgtgtgtgcgtgcgtacacacacacgtgtgtgcgcgtgtgtatgtgtatatatgtgtgtatatatgtatatatgtgtgtatatatgtatatatgtatatgtgtatatatatgtgtatatatatatgaaatttttcataaattcttttcattatctattatcactgaaattccatcataccattaagatacatgcagaattgttctcactcataggtgggaattgaacaatgagaacacatggacacaggaaggggaacatcacacaccgggtcctgttatggggtcgggggaggggggagggatagcattaggagatatacctaatgtaaatgacgagttaatgggtgcagcacaccaacatggcacatgtatacatatgtaacaaacctgcacattgtgcacatgtaccctaaaacttagagtataattaaaaaaaaaagatacatgcaaatttatgtctgttaggtatttaccatatggaaaaactaaaataatcaagaaaggaaattcagtaggtggttgacagtttaaatacaaatcacaaatgacatctttttaaatataacaagtagcttatttttaaaggtgtcacttactttgcaaagtataaggagaactgttattaagaatttaccaggttggaatggctagtgtttatgggagagagtttagcacaagacggagtgagacaagattgctggggtcttattttgaatccagcagccaacgctgtatggaatagtgaaaaagttgcctctttctgtgcttgttttctacttggtatctttaagaatgggctatttaggagcaaggagcctagcagaaagcatctgtcaatcttctaaaactttacctacaaaagttttactggcttgtgtcccatccagtgtgtttcaaagccagaaagtatattggccacaagcacctgtaggtggctgaggtgtgactgtagtcatccgtgagtcatgttttcagtatgtattgaaattccttatttggacttgatttcaaaggtagaagggccttttacaggtaaggaactgagattgagacacatcaagagtctagcctcgagcttctgttcagtgtttttcccaaaattattgtttccttctggtctgggactctagagcaaagattgaaaactgtggcccaaagtgtgagccaaatccagccaccatgcgttttttttaaatcaagttttcctggaaaacagccaaacccatttatttggtattgcctatgtctgcttccatgctgcagtggcagagttgagtagttacaacagagattgcatggccagcaacacctaaaacatttattagttggccctttacagaaaacgtttgatgctctctgccttgcaacattgtgtacgtggtggtcagtgtgcttggaatcataggtgcaatgtaggatgcagacttagaaaacagtgcccttgctcccaaggaattgtttgcactttagatgacaaggcatgtttgagacatgtgaaaggaacaataacaagttatgtaagagaggagacaggttctggactgcaggctatattttcagaccaaccagaatagttacgataatatcattaacataaataaagtactaagtatttagctacgtaaaagaaacgatttattgcactttggattatacagttcttcattcattcattcaaaaattattgccagtctgctcatgtgccaggcattgttctagatgatagggcactgcgtctctaaatgccaaatttcgtatccttgctggtggaaggcaatgtcctcttgctttatgccacgacacaaactaagctcctgctttaactatagacagctaaatcttaaacgaacacttttcagtcagtttagttttctcttaaagtactttaattccgttaaaacctgagccaccagatttcctgtctgcctgtctcttccttggccttaatccaaaactctgctgaggaagaagattcgttggtacactgacaattgttttataatccattcatttcataacccctcatttgctacccaaaagtggggacctaaatctgtacggatttacgtgttcaaaggccatggcctacccaaatagagaatatctcctttcttgtgtttctctcacaacttttgctgaagtctctccatctttgtgaacatgaacttctcgatttgtgaggctatcgctggtcaattgggtcattaatcctacagcaggcaagacacagaatttcctctcagctcaagatctcttcactcccaaccctcttagaacacacttcgcagcaatccttggagtctttaaaggtagccttttgtgactttaaaaaacacttttactatctctcaaggttacatccttaacagaaacaaaaagattctaatcagcgagacatcaagtctcttgcattgcttatttgtcacccaactaaaacaatgtactttcttgatttggttttattgactggatgaattatatatatacaaagattcaattcgggaagcctctgaagtaagatgaagaaaaaagtatgaaactccagagaaagcagtttgaggcttgtcctcaggggcttcaaggactgggagaagtcactgtattctggcatcttgcttctgtctccacttcctcccacagtgtttaatgctgctgtgaatttgtttcaaaggaagcctatagacttttttttttttttttaatttygtcacatgagcctcaggagcagccttgacagctaaaagacctcgtaarrgrgaagtgtgaagggattgcatgaaagtgctgggggcaagtctcagccctcggcctttgttggaaggtgtggggtgtgcagacacatgtgcaccttcgcacacatgcatctgtgcataaatatctgtgtttgcaggaaagaaaagatagggttgtgggatgtccccagaagccacagggattccagtgttttagtaccaggtgaaagagccgcttcctcccacactatctcagggagatgcccttctgtagacctctgtagcccagtaccctcaagagctcctggagacagatggccccgaacagtcctagggaagcagtgtgggcctgtggcaaaagcttggactgcgaagtcagcatgattggaatccggttcttgactcccaagcaggtgcataatgtccctgagcccttctttccttatctgtaatattgagaatagtaatacccatttctgggcccttttgactgttaatgagacaacatgtgaatgcatggcacaagaaagttaattgctacgtgtcactgtccccccctgcctcactgctgagctgccatcctgcccatctgagagggactgtgtgggagctgygggtacagccagcacaactgcctgcagagccacgcagggcactgacagggaaggcctgtgtggggtgcccttcaaggccacctccgttttcttatttccttggagatttacttttgtgctcctgcttcccctccctgaagctttgcctgctgtccatatytggaggggatgaatargatgagcactggggaggggaggagccatcactccagcaggaatattcccagcggctgagtcactgcatttgattttcagtgtgaacaactgagaaatcaaagagccctaaaagaggaggaagtttcaggacaatgttttaaaagataaaaaaacatcaacagcatggtgtctgagtggaaaataatagaaggggcttgaggagactggaaattccagtttgtgtaagggcrcacagtgctgtaatacagagtcctacctccctgcagtccctggatgtgaattcccaggctgcacccacacctgagcaaagcggaggctgggccttattaggttctgactgcgggctggatctcagctgcaggctgtgagtttcggataccggtgtttyccagccttctccacaccttatgtaatcacaggtgaaaaggtccagcctcatttgcagctgtggttcttctgccccaggaagccaggaagcgtagatttttgtattatttgcctccacttctccctcccccagcgtgccaccgtgcacatatgttttctgttttcctaagccacggcaaagcacaagcaattrcccattgtaaacacacctctgcgtatcaacacacacctggctgcactggattgaccarctttctgcttctaggtaaggctgatctagtctagaatagaggaggaggagggaaaaaaaaaaaaaaaaaacaagcagcagatggccccctgaatgttgtaaaccgtgtttctctaagcagggtttctcaacactctcgatatttgggccaaataataatttgtggggttgcttactatattgtaagagattcagcagcatccctggcctctacccactagatgctaggagcaccctgcaccccagtgtgacaaccagaaatgcctccagatattgccacatgcccccagttcagaaccatatttgtaaagcttagtagcaactttttttttcatatgctactttgcgtgttttgttgctgaactggaaataaacgttaatttttaggtaataaatttcaaaaaatgtaacagggacactcagcctctcttctggtaattatgcccatgacactgtcatttgcaggccttctttaaaattccacttgggcagttaaagaacataaaatgactttcttagaagcttacctgaaacttaaattaaccacaatcattaaacattccctatgtcaataatttgactttcctactcaaagttttttaaggcatcagttttgtctagcgtggtttttttctttagaaaccatgttggttatgtgtgaattgcccatctttttacaatctctgctcaataagtttatacaatgagtctctggtaagagacagacgtgggagtgaaaatatttctccttaaccacaggaagggattttttacaatgcctttagctgcggataccgagggtacctcacccagcaggaaggagagggaactatacttgggctaaacactttcataaactacttctcatggaaaagaaaatccaaatagtggaaatttctttaaaatatccatgtgccttgagatagaagaaagccctttcgtttaagaaaaatgcacttaaaattaatgaataccttgtgatccaaaaacattttatacatatacgttcaggtgctttgaagtggagtgaacttctatttataaagtgtgttgcgctttattatatagtattatgcatttacattgatgatcaaagaacattgtatctgtgcaggcatgggttccgaaaaggctgaaaaattccaggtgagccgtggcaacaacctctaaaggatctaggaacctaaagaggatctgccttttatttaatagaaatcttagaaacaaaaataactgacatggcttgaatgtcaattgtttaaaaaaaaaaaaaaaaaggaaaaaaaatctattgtgtggtcaggcagttatttttatcatctaggcataatttttaccaaagaaacaaaacaatcaataatgttataaaagccacttatactctgagcttgaaacaactgctttatgccacaaaattcctattgctgtctccgttagtgactaattcaatatgtcctgaatgtcaacgtatttttattactcagctaaagttggctttgctggattaaatgtcatttaaaatgatcaattggcagcttgtttggggttgttttcacatttatgaaaggaaaagtttgccggatacaaatgttcttgaagctgatagggaaacggtgttctctggtaagccctgcccttccttttgccatctgataagtagataacattctaggtcctagtttgatgcctccgaaaaaccaacatggcagcccagtgcaggttaagcccttacattggagaaatggtctggttcacgtttcactgttttatgagaagtagaatgtaccattacagtaaaagagaagcaacagaaacatgcagtgaaaacgcccatgcttgtggttagagaactgcccgctttctttttgctctacagtaggcttctgagtggagtgccttccgcctagagtcaagagggctgccatgatgtcacccaccttcatatgggcaaaatgtctttatatgaaactgtaaaagacaaccaggtcgtttcttaattgctgaaatttattaaaatgaacacactagaaatcacattcccaatccagaggaatccaatggcgtcgtcagcctatttgcaatggaaatggttgtaaacctatagggagacataggaggggctgcacacaaactactttcgttcgtcctgatttactggcttcttttccccctagagatacagtctcagtctgtcactctatcgcccaggctgagtgcagtgggttgatcatggctcactgcagccccaaacccctgggctcaagcaattctcccacctcagcctcccaactagctgggattacaggcatgcaccaccacgcctggataatttttaaattttttgtagagatgaggtctcgttatgttgcctgggctggtcttgaactcccggactttcaagcaagtctactgcccctgcctcccaaaacaaacattgggattataattataagccaccacacccaaccctaatttacaggcactgtatgtggtaatatgtgattttgtcagatgttttccagtggaagagattatggaaaattaaaatgtgtctgccatttgatagtaggacaaatacttgaaatattaagccacagctgagttctggccttagtccttttggggctgctctgacaaactgccgtagactgggtagttggtacgcaatagatacggattgctccacagttctgggggctggggagatcaaggccctggcagatgaggcatctggtgagggcccactttctggttcatagacagcaccttcttgctgtgtcttcacttggtggaagggtgaggggtctctctcaggcctcttttaaaagggcactaatcccactcacaggggtggggcccccaagacctaatcacctcccaaaggtaccttggtagttagttaggatttcaacagatgaatttggggaggacatgaagattcagaccacagcagatctctattttccctttatagagaaagtaattcaagacaaggagatgcttacaagggaaaaagacactttgccactttttactgctttgcttagaaactagaatcatcctccttcaaatgcctgtaaaacgagctagattattctcagtctgcagtaggacactgatttctcaaggtacttaagatgcttgggttgctcatcttctccacacccccacctcagcccatcccctggcaatacagaatgcagccatggcaagacggggtgggcaatagaagtggctggacagcttctgttgttagagtggggttcaaagtccaggactatggtgttgttgttttaagaaggaggccacttgtccttttccaaaacacaatgagtgacacaccacattaatgtttaaacacagataatacagaagaaaggattccataagggatactaaagatttagggctgctgtacatttaatggtagttccttgaaagattaagcttctggaaaatgccacagttttctgccagtgtcttctgctattcaaagagaacgctggagttcagaaaagatatactgagcaggtgtactttgttctggaaagtcctaagattttataaacatacacccattaacgagtttctctgagactagaaattgcattgggaagtgtgtcatagcatgggttttggggtcatgcacagccaagaatcctgtgtgtcattcataagctgtgtcctcctgagtaatcatcaaaccctctcagccccagcttcctgatctataaaataggaatagcaacagcacctgcctcataagcggcgtaagggtcagatgtaaccaggcttgtcgaagccacagcacagtacctacaaatagcacccacttaaataccgttgttatttttattactttctcttccctcccgttatcactaatataataatcctgtaaagtaagtgctgttattcccacttcataagtgaggcaacagaacctcaggaaggttaagaagcgtgtccagggtggcccaactgaattcccccttgtaaatatatccccagagaagggtgtatgtttctctgcaatgcagatgtgttggctgtaatatattccaagtctcaactggacactcccctttcaaatgtgccaggcctaggccttgcccaaagtaaaaaagaaagaacattgtagtgcaggagtccagagtgcaaatccttgtgacctcaggcaagttatttcaacctctctgaggatcagaaataatacaggtaaagtgccgagttcatacttgtaattcagtagttgatcttccatcaccagccattctgacaagtgcctataaaaagtgggcatttccagaaccatgcagtgaacacctggaaattggtgctgctcctcatctggaggccagttaacctttaactcaacctagaaggcacacatctgtccccagctgcctctccaggttctgctggagggcaaccacacaccttcacagcacacatccagaaagtcatagaacaaggggaaggtgtacatcatgtcttcttcttcttcttttttttttttttttgagactgagtctcactttgtcaccgaggctggagggcagtggtgcgatctcgactcactgcaacttccacctcctgggttcaggcgattctcctgcctcagtgtcctgagtagctgggattacaggcacacgccaccatgcctggctaagtttttgtatttttagtagagacggggtttcgccacgttggtcaggctggtctcaaactcctggcctcaagtgatccacctgcctcagcttcccaaagtgctgggattacaggcgtgagccaccacgcccggccgtgtcttctcttttaatttactagcccacagccaaaaaccaaggcccaacaccatgcctagtccatattaaatcacctaacacttaataaaatatccattgcctgactaaatgttcaaacatcagtctgcaagtggagaaagtgacttttgcactgggttcctttctgccatgatccactatatcaaaacattttttaaagacctccaaaatgtgatagaatgagaatatctgtatctctttttgaaaccatgctagccacagttcccacagtcagagtcaccaagccacatagtttttcttttcccaccatttttcactcctcactcctttttgctgtgttttagcctaccccagccttctcatctttatccatccatctcccaccaacaccaggataaccttttcactccactattttttaccacacagctctctctgtaaccatcaggaccctctttccacccttttttccttccagcctgcatttaacacacattcagagcccattgattcagttagaacttgcctcccgtctttcacatgggttctgcccaggtttaagtttgggtcacgaccgtggacttctgggtcactgtatcatcatctgtggagggaggctgtcgcctggatcatctccgaggcctccggcgagtcaaaggtcacacaacaggacctccctccatctttctgggcctccgtttcttcccggtaaaacaaggaagttagttagacaatcagtcaacccaaactaggcagaagcagttgctggattcttttttgattcttctggttagtgcctcaacaagaaacattttcaacagtgttttcttgcccttttcctctgtag

SEQ ID NO: 199 - DNA, 763 bp, Homo sapiens
gaattcagggttttcttttcattttattttcatttgttcatgtgtttgtatttacatacattgtgcctgaatattgtacatgtatgtgacagttgtgtactgtagaatcaaaaactaatgtctgtgaactgaactcttcttgaactttttgttgttgttgttattgttgcttttggagatagggtcttgctctgtcacccaggctggactgcagtggcacaatcacagctcactgcagccttgagctcctggtctcaagcaaccctcccacctcagcctcccaagtagctggggctgcaggcatatgctacctgactaattaaaaatttttttttttttttgtagagacagggtctcactatttttactagtttgcccgggccaagccagtgttgaactactggcctcaagtgatcctcccaccttggcctccccaaagtgcatccctacaggcatgagccactgcactcagcctgaactttcgaaatttattttaagggcccacttttaaatgcttcttttcagcagctaactttccagcggatgcttcatgtggtgccagccataagacgaaaacaagagaagatcccaaagaaaatagaaaaacaaaaaaagaaaaatttgtcgaatcccaggtggaatctgaatcaagtgtacttaatgattctccctttccagaggatgacagtgaagggctacattccgacagcagagaagagaaacaaaacactaaaagtgcaagagagagagcagggcaggacat

SEQ ID NO: 200 - protein, 198 aa, Homo sapiens [sequence omitted]

SEQ ID NO: 201 - DNA, 11204 bp, Homo sapiens
aggttcagagagactgtgggaatatgggggaattagaggctatctgaggctcttcaacacaataacccaagaagctatttaaatgctctttaaggtatttacataaatattactattctcattgtgcttttattttgtgttatcatgattataattgaagtgtctactgttactgcctcctgatctttgctagctatggagcatggactgggcttttagagcagcagccccaaaggaacctaaacattaaagcagagctgccctcaatggtttaacctgtgtgactctgcctatgacagccccacccacccatcttcactggatccaaatcaggagcaaggccgttggggtacctggtgggggtgatgctgtcaggggaggagcccaaaagggcaagctcaaatttgaatgtgaagggccaatgcactgtcagactgagacagagaaccatcattaattgaagtgagatttttctggcctgagacttgcagggaggcaagaagacactctggacaccactatggacaggtaaagaggcagtcttctcgtgggtgattgcactggccttcctctcagagcaaatctgagtaatgagactggtagctatccctttctctcatgtaactgtctgactgataagatcagcttgatcaatatgcatatatattttttgatctgtctccttttcttctattcagatcttatacgctgtcagcccaattctttctgtttcagacttctcttgatttccctctttttcatgtggcaaaagaagtagtgcgtacaatgtactgattcgtcctgagatttgtaccatggttgaaactaatttatggtaataatattaacatagcaaatctttagagactcaaatcatgaaaaggtaatagcagtactgtactaaaaacggtagtgctaattttcgtaataattttgtaaatattcaacagtaaaacaacttgaagacacactttcctagggaggcgttactgaaataatttagctatagtaagaaaatttgtaattttagaaatgccaagcattctaaattaattgcttgaaagtcactatgattgtgtccattataaggagacaaattcattcaagcaagttatttaatgttaaaggcccaattgttaggcagttaatggcacttttactattaactaatctttccatttgttcagacgtagcttaacttacctcttaggtgtgaatttggttaaggtcctcataatgtctttatgtgcagtttttgataggttattgtcatagaacttattctattcctacatttatgattactatggatgtatgagaataacacctaatccttatactttacctcaatttaactcctttataaagaacttacattacagaataaagattttttaaaaatatatttttttgtagagacagggtcttagcccagccgaggctggtctctaagtcctggcccaagcgatcctcctgcctgggcctcctaaagtgctggaattatagacatgagccatcacatccaatatacagaataaagatttttaatggaggatttaatgttcttcagaaaattttcttgaggtcagacaatgtcaaatgtctcctcagtttacactgagattttgaaaacaagtctgagctataggtccttgtgaagggtccattggaaatacttgttcaaagtaaaatggaaagcaaaggtaaaatcagcagttgaaattcagagaaagacagaaaaggagaaaagatgaaattcaacaggacagaagggaaatatattatcattaaggaggacagtatctgtagagctcattagtgatggcaaaatgacttggtcaggattatttttaacccgcttgtttctggtttgcacggctggggatgcagctagggttctgcctcagggagcacagctgtccagagcagctgtcagcctgcaagcctgaaacactccctcggtaaagtccttcctactcaggacagaaatgacgagaacagggagctggaaacaggcccctaaccagagaagggaagtaatggatcaacaaagttaactagcaggtcaggatcacgcaattcatttcactctgactggtaacatgtgacagaaacagtgtaggcttattgtattttcatgtagagtaggacccaaaaatccacccaaagtcctttatctatgccacatccttcttatctatacttccaggacactttttcttccttatgataaggctctctctctctccacacacacacacacacacacacacacacacacacacacacacacaaacacacaccccgccaaccaaggtgcatgtaaaaagatgtagattcctctgcctttctcatctacacagcccaggagggtaagttaatataagagggatttattggtaagagatgatgcttaatctgtttaacactgggcctcaaagagagaatttcttttcttctgtacttattaagcacctattatgtgttgagcttatatatacaaagggttattatatgctaatatagtaatagtaatggtggttggtactatggtaattaccataaaaattattatccttttaaaataaagctaattattattggatcttttttagtattcattttatgttttttatgtttttgattttttaaaagacaatctcaccctgttacccaggctggagtgcagtggtgcaatcatagctttctgcagtcttgaactcctgggctcaagcaatcctcctgccttggcctcccaaagtgttgggatacagtcatgagccactgcatctggcctaggatccatttagattaaaatatgcattttaaattttaaaataatatggctaatttttaccttatgtaatgtgtatactggtaataaatctagtttgctgcctaaagtttaaagtgctttccaataagcttcatgtacgtgaggggagacatttaaagtgaaacagacagccaggtgtggtggctcacgcctgtaatcccagcactctgggaggctgaggtgggtggatcgcttgagccctggagttcaagaccagcctgagcaacatggcaaaaccctgtttctataacaaaaattagccgggcatggtggcatgtgcctgtggtcccagctactagggggctgaggcaggagaatctttggagcccaggaggtcaaggctgcactgagcagtgcttgcgccactgcactccagcctgggtgacaggaccagaccttgcctcaaaaaaataagaagaaaaattaaaaataaatggaaacaactacaaagagctgttgtcctagatgagctacttagttaggctgatattttggtatttaacttttaaagtcagggtctgtcacctgcactacattattaaaatatcaattctcaatgtatatccacacaaagactggtacgtgaatgttcatagtacctttattcacaaaaccccaaagtagagactatccaaatatccatcaacaagtgaacaaataaacaaaatgtgctatatccatgcaatggaataccaccctgcagtacaaaggaagaagctacttggggatgaatcccaaagtcatgacgctaaatgaaagagtcagacatgaaggaggagataatgtatgccatacgaaattctagaaaatgaaagtaacttatagttacagaaagcaaatcagggcaggcatagaggctcacacctgtaatcccagcactttgagaggccacgtgggaagattgctagaactcaggagttcaagaccagcctgggcaacacagtgaaactccattctccacaaaaatgggaaaaaaagaaagcaaatcagtggttgtcctgtggggaggggaaggactgcaaagagggaagaagctctggtggggtgagggtggtgattcaggttctgtatcctgactgtggtagcagtttggggtgtttacatccaaaaatattcgtagaattatgcatcttaaatgggtggagtttactgtatgtaaattatacctcaatgtaagaaaaaataatgtgtaagaaaagtttcaattctcttgccagcaaacgttattcaaattcctgagccctttacttcgcaaattctctgcacttctgccccgtaccattaggtgacagcactagctccacaaattggataaatgcatttctggaaaagactagggacaaaatccaggcatcacttgtgctttcatatcaaccacgctgtacagcttgtgttgctgtctgcagctgcaatggggactcttgatttctttaaggaaacttgggttaccagagtatttccacaaatgctattcaaattagtgcttatgatatgcaagacactgtgctaggagccagaaaacaaagaggaggagaaatcagtcattatgtgggaacaacatagcaagatatttagatcattttgactagttaaaaaagcagcagagtacaaaatcacacatgcaatcagtataatccaaatcatgtaaatatgtgcctgtagaaagactagaggaataaacacaagaatcttaacagtcattgtcattagacactaagtctaattattattattagacactatgatatttgagatttaaaaaatctttaatattttaaaatttagagctcttctatttttccatagtattcaagtttgacaatgatcaagtattactctttctttttttttttttttttttttttttgagatggagttttggtcttgttgcccatgctggagtggaatggcatgaccatagctcactgcaacctccacctcctgggttcaagcaaagctgtcgcctcagcctcccgggtagatgggattacaggcgcccaccaccacactcggctaatgtttgtatttttagtagagatggggtttcaccatgttggccaggctggtctcaaactcctgacctcagaggatccacctgcctcagcctcccaaagtgctgggattacagatgtaggccactgcgcccggccaagtattgctcttatacattaaaaaacaggtgtgagccactgcgcccagccaggtattgctcttatacattaaaaaataggccggtgcagtggctcacgcctgtaatcccagcactttgggaagccaaggcgggcagaacacccgaggtcaggagtccaaggccagcctggccaagatggtgaaaccccgtctctattaaaaatacaaacattacctgggcatgatggtgggcgcctgtaatcccagctactcaggaggctgaggcaggaggatccgcggagcctggcagatctgcctgagcctgggaggttgaggctacagtaagccaagatcatgccagtatacttcagcctgggcgacaaagtgagaccgtaacaaaaaaaaaaaaatttaaaaaaagaaatttagatcaagatccaactgtaaaaagtggcctaaacaccacattaaagagtttggagtttattctgcaggcagaagagaaccatcagggggtcttcagcatgggaatggcatggtgcacctggtttttgtgagatcatggtggtgacagtgtggggaatgttattttggagggactggaggcagacagaccggttaaaaggccagcacaacagataaggaggaagaagatgagggcttggaccgaagcagagaagagcaaacagggaaggtacaaattcaagaaatattggggggtttgaatcaacacatttagatgattaattaaatatgaggactgaggaataagaaatgagtcaaggatggttccaggctgctaggctgcttacctgaggtggcaaagtcgggaggagtggcagtttaggacagggggcagttgaggaatattgttttgatcattttgagtttgaggtacaagttggacacttaggtaaagactggaggggaaatctgaatatacaattatgggactgaggaacaagtttattttattttttgtttcgttttcttgttgaagaacaaatttaattgtaatcccaagtcatcagcatctagaagacagtggcaggaggtgactgtcttgtgggtaagggtttggggtccttgatgagtatctctcaattggccttaaatataagcaggaaaaggagtttatgatggattccaggctcagcagggctcaggagggctcaggcagccagcagaggaagtcagagcatcttctttggtttagcccaagtaatgacttccttaaaaagctgaaggaaaatccagagtgaccagattataaactgtactcttgcattttctctccctcctctcacccacagcctcttgatgaaccggaggaagtttctttaccaattcaaaaatgtccgctgggctaagggtcggcgtgagacctacctgtgctacgtagtgaagaggcgtgacagtgctacatccttttcactggactttggttatcttcgcaataaggtatcaattaaagtcagctttgcaagcagtttaatggtcaactgtgagtgcttttagagccacctgctgatggtattacttccatccttttttggcatttgtgtctctatcacattcctcaaatccttttttttatttctttttccatgtccatgcacccatattagacatggcccaaaatatgtgatttaattcctccccagtaatgctgggcaccctaataccactccttccttcagtgccaagaacaactgctcccaaactgtttaccagctttcctcagcatctgaattgcctttgagattaattaagctaaaagcatttttatatgggagaatattatcagcttgtccaagcaaaaattttaaatgtgaaaaacaaattgtgtcttaagcatttttgaaaattaaggaagaagaatttgggaaaaaattaacggtggttcaattctgttttccaaatgatttcttttccctcctactcacatgggtcgtaggccagtgaatacattcaacatggtgatccccagaaaactcagagaagcctcggctgatgattaattaaattgatctttcggctacccgagagaattacatttccaagagacttcttcaccaaaatccagatgggtttacataaacttctgcccatgggtatctcctctctcctaacacgctgtgacgtctgggcttggtggaatctcagggaagcatccgtggggtggaaggtcatcgtctggctcgttgtttgatggttatattaccatgcaattttctttgcctacatttgtattgaatacatcccaatctccttcctattcggtgacatgacacattctatttcagaaggctttgattttatcaagcactttcatttacttctcatggcagtgcctattacttctcttacaatacccatctgtctgctttaccaaaatctatttccccttttcagatcctcccaaatggtcctcataaactgtcctgcctccacctagtggtccaggtatatttccacaatgttacatcaacaggcacttctagccattttccttctcaaaaggtgcaaaaagcaacttcataaacacaaattaaatcttcggtgaggtagtgtgatgctgcttcctcccaactcagcgcacttcgtcttcctcattccacaaaaacccatagccttccttcactctgcaggactagtgctgccaagggttcagctctacctactggtgtgctcttttgagcaagttgcttagcctctctgtaacacaaggacaatagctgcaagcatccccaaagatcattgcaggagacaatgactaaggctaccagagccgcaataaaagtcagtgaattttagcgtggtcctctctgtctctccagaacggctgccacgtggaattgctcttcctccgctacatctcggactgggacctagaccctggccgctgctaccgcgtcacctggttcacctcctggagcccctgctacgactgtgcccgacatgtggccgactttctgcgagggaaccccaacctcagtctgaggatcttcaccgcgcgcctctacttctgtgaggaccgcaaggctgagcccgaggggctgcggcggctgcaccgcgccggggtgcaaatagccatcatgaccttcaaaggtgcgaaagggccttccgcgcaggcgcagtgcagcagcccgcattcgggattgcgatgcggaatgaatgagttagtggggaagctcgaggggaagaagtgggcggggattctggttcacctctggagccgaaattaaagattagaagcagagaaaagagtgaatggctcagagacaaggccccgaggaaatgagaaaatggggccagggttgcttctttcccctcgatttggaacctgaactgtcttctacccccatatccccgcctttttttccttttttttttttttgaagattatttttactgctggaatacttttgtagaaaaccacgaaagaactttcaaagcctgggaagggctgcatgaaaattcagttcgtctctccagacagcttcggcgcatccttttggtaaggggcttcctcgctttttaaattttctttctttctctacagtcttttttggagtttcgtatatttcttatattttcttattgttcaatcactctcagttttcatctgatgaaaactttatttctcctccacatcagctttttcttctgctgtttcaccattcagagccctctgctaaggttccttttccctcccttttctttcttttgttgtttcacatctttaaatttctgtctctccccagggttgcgtttccttcctggtcagaattcttttctcctttttttttttttttttttttttttttaaacaaacaaacaaaaaacccaaaaaaactctttcccaatttactttcttccaacatgttacaaagccatccactcagtttagaagactctccggccccaccgacccccaacctcgttttgaagccattcactcaatttgcttctctctttctctacagcccctgtatgaggttgatgacttacgagacgcatttcgtactttgggactttgatagcaacttccaggaatgtcacacacgatgaaatatctctgctgaagacagtggataaaaaacagtccttcaagtcttctctgtttttattcttcaactctcactttcttagagtttacagaaaaaatatttatatacgactctttaaaaagatctatgtcttgaaaatagagaaggaacacaggtctggccagggacgtgctgcaattggtgcagttttgaatgcaacattgtcccctactgggaataacagaactgcaggacctgggagcatcctaaagtgtcaacgtttttctatgacttttaggtaggatgagagcagaaggtagatcctaaaaagcatggtgagaggatcaaatgtttttatatcaacatcctttattatttgattcatttgagttaacagtggtgttagtgatagatttttctattcttttcccttgacgtttactttcaagtaacacaaactcttccatcaggccatgatctataggacctcctaatgagagtatctgggtgattgtgaccccaaaccatctctccaaagcattaatatccaatcatgcgctgtatgttttaatcagcagaagcatgtttttatgtttgtacaaaagaagattgttatgggtggggatggaggtatagaccatgcatggtcaccttcaagctactttaataaaggatcttaaaatgggcaggaggactgtgaacaagacaccctaataatgggttgatgtctgaagtagcaaatcttctggaaacgcaaactcttttaaggaagtccctaatttagaaacacccacaaacttcacatatcataattagcaaacaattggaaggaagttgcttgaatgttggggagaggaaaatctattggctctcgtgggtctcttcatctcagaaatgccaatcaggtcaaggtttgctacattttgtatgtgtgtgatgcttctcccaaaggtatattaactatataagagagttgtgacaaaacagaatgataaagctgcgaaccgtggcacacgctcatagttctagctgcttgggaggttgaggagggaggatggcttgaacacaggtgttcaaggccagcctgggcaacataacaagatcctgtctctcaaaaaaaaaaaaaaaaaaaagaaagagagagggccgggcgtggtggctcacgcctgtaatcccagcactttgggaggccgagccgggcggatcacctgtggtcaggagtttgagaccagcctggccaacatggcaaaaccccgtctgtactcaaaatgcaaaaattagccaggcgtggtagcaggcacctgtaatcccagctacttgggaggctgaggcaggagaatcgcttgaacccaggaggtggaggttgcagtaagctgagatcgtgccgttgcactccagcctgggcgacaagagcaagactctgtctcagaaaaaaaaaaaaaaaagagagagagagagaaagagaacaatatttgggagagaaggatggggaagcattgcaaggaaattgtgctttatccaacaaaatgtaaggagccaataagggatccctatttgtctcttttggtgtctatttgtccctaacaactgtctttgacagtgagaaaaatattcagaataaccatatccctgtgccgttattacctagcaacccttgcaatgaagatgagcagatccacaggaaaacttgaatgcacaactgtcttattttaatcttattgtacataagtttgtaaaagagttaaaaattgttacttcatgtattcatttatattttatattattttgcgtctaatgattttttattaacatgatttccttttctgatatattgaaatggagtctcaaagcttcataaatttataactttagaaatgattctaataacaacgtatgtaattgtaacattgcagtaatggtgctacgaagccatttctcttgatttttagtaaacttttatgacagcaaatttgcttctggctcactttcaatcagttaaataaatgataaataattttggaagctgtgaagataaaataccaaataaaataatataaaagtgatttatatgaagttaaaataaaaaatcagtatgatggaataaacttgagagtccagaagttatcccatacatctgtaatcaactaatttctcacaagggtgtaaggaccattcaatggagaaaa

SEQ ID NO: 202 - protein, 198 aa, Homo sapiens [sequence omitted]

SEQ ID NO: 203 - DNA, 2791 bp, Homo sapiens
gaaccatcattaattgaagtgagatttttctggcctgagacttgcagggaggcaagaagacactctggacaccactatggacagcctcttgatgaaccggaggaagtttctttaccaattcaaaaatgtccgctgggctaagggtcggcgtgagacctacctgtgctacgtagtgaagaggcgtgacagtgctacatccttttcactggactttggttatcttcgcaataagaacggctgccacgtggaattgctcttcctccgctacatctcggactgggacctagaccctggccgctgctaccgcgtcacctggttcacctcctggagcccctgctacgactgtgcccgacatgtggccgactttctgcgagggaaccccaacctcagtctgaggatcttcaccgcgcgcctctacttctgtgaggaccgcaaggctgagcccgaggggctgcggcggctgcaccgcgccggggtgcaaatagccatcatgaccttcaaagattatttttactgctggaatacttttgtagaaaaccatgaaagaactttcaaagcctgggaagggctgcatgaaaattcagttcgtctctccagacagcttcggcgcatccttttgcccctgtatgaggttgatgacttacgagacgcatttcgtactttgggactttgatagcaacttccaggaatgtcacacacgatgaaatatctctgctgaagacagtggataaaaaacagtccttcaagtcttctctgtttttattcttcaactctcactttcttagagtttacagaaaaaatatttatatacgactctttaaaaagatctatgtcttgaaaatagagaaggaacacaggtctggccagggacgtgctgcaattggtgcagttttgaatgcaacattgtcccctactgggaataacagaactgcaggacctgggagcatcctaaagtgtcaacgtttttctatgacttttaggtaggatgagagcagaaggtagatcctaaaaagcatggtgagaggatcaaatgtttttatatcaacatcctttattatttgattcatttgagttaacagtggtgttagtgatagatttttctattcttttcccttgacgtttactttcaagtaacacaaactcttccatcaggccatgatctataggacctcctaatgagagtatctgggtgattgtgaccccaaaccatctctccaaagcattaatatccaatcatgcgctgtatgttttaatcagcagaagcatgtttttatgtttgtacaaaagaagattgttatgggtggggatggaggtatagaccatgcatggtcaccttcaagctactttaataaaggatcttaaaatgggcaggaggactgtgaacaagacaccctaataatgggttgatgtctgaagtagcaaatcttctggaaacgcaaactcttttaaggaagtccctaatttagaaacacccacaaacttcacatatcataattagcaaacaattggaaggaagttgcttgaatgttggggagaggaaaatctattggctctcgtgggtctcttcatctcagaaatgccaatcaggtcaaggtttgctacattttgtatgtgtgtgatgcttctcccaaaggtatattaactatataagagagttgtgacaaaacagaatgataaagctgcgaaccgtggcacacgctcatagttctagctgcttgggaggttgaggagggaggatggcttgaacacaggtgttcaaggccagcctgggcaacataacaagatcctgtctctcaaaaaaaaaaaaaaaaaaaagaaagagagagggccgggcgtggtggctcacgcctgtaatcccagcactttgggaggccgagccgggcggatcacctgtggtcaggagtttgagaccagcctggccaacatggcaaaaccccgtctgtactcaaaatgcaaaaattagccaggcgtggtagcaggcacctgtaatcccagctacttgggaggctgaggcaggagaatcgcttgaacccaggaggtggaggttgcagtaagctgagatcgtgccgttgcactccagcctgggcgacaagagcaagactctgtctcagaaaaaaaaaaaaaaaagagagagagagagaaagagaacaatatttgggagagaaggatggggaagcattgcaaggaaattgtgctttatccaacaaaatgtaaggagccaataagggatccctatttgtctcttttggtgtctatttgtccctaacaactgtctttgacagtgagaaaaatattcagaataaccatatccctgtgccgttattacctagcaacccttgcaatgaagatgagcagatccacaggaaaacttgaatgcacaactgtcttattttaatcttattgtacataagtttgtaaaagagttaaaaattgttacttcatgtattcatttatattttatattattttgcgtctaatgattttttattaacatgatttccttttctgatatattgaaatggagtctcaaagcttcataaatttataactttagaaatgattctaataacaacgtatgtaattgtaacattgcagtaatggtgctacgaagccatttctcttgatttttagtaaacttttatgacagcaaatttgcttctggctcactttcaatcagttaaataaatgataaataattttggaagctgtgaagataaaataccaaataaaataatataaaagtgatttatatgaagttaaaataaaaaatcagtatgatggaataaacttg

SEQ ID NO: 204 - protein, 198 aa, Homo sapiens [sequence omitted]

SEQ ID NO: 205 - DNA, 2791 bp, Homo sapiens; identical to SEQ ID NO: 203

SEQ ID NO: 206 - protein, 416 aa, Homo sapiens; identical to SEQ ID NO: 46

SEQ ID NO: 207 - DNA, 1284 bp, Homo sapiens; identical to SEQ ID NO: 47

SEQ ID NO: 208 - protein, 797 aa, Homo sapiens; identical to SEQ ID NO: 48

SEQ ID NO: 209 - DNA, 3036 bp, Homo sapiens; identical to SEQ ID NO: 49

SEQ ID NO: 210 - protein, 99 aa, Homo sapiens; identical to SEQ ID NO: 50

SEQ ID NO: 211 - DNA, 296 bp, Homo sapiens; identical to SEQ ID NO: 51

SEQ ID NO: 212 - protein, 673 aa, Homo sapiens
MDLTKMGMIQLQNPSHPTGLLCKANQMRLAGTLCDVVIMVDSQEFHAHRTVLACTSKMFEILFHRNSQHYTLDFLSPKTFQQILEYAYTATLQAKAEDLDDLLYAAEILEIEYLEEQCLKMLETIQASDDNDTEATMADGGAEEEEDRKARYLKNIFISKHSSEESGYASVAGQSLPGPMVDQSPSVSTSFGLSAMSPTKAAVDSLMTIGQSLLQGTLQPPAGPEEPTLAGGGRHPGVAEVKTEMMQVDEVPSQDSPGAAESSISGGMGDKVEERGKEGPGTPTRSSVITSARELHYGREESAEQVPPPAEAGQAPTGRPEHPAPPPEKHLGIYSVLPNHKADAVLSMPSSVTSGLHVQPALAVSMDFSTYGGLLPQGFIQRELFSKLGELAVGMKSESRTIGEQCSVCGVELPDNEAVEQHRKLHSGMKTYGCELCGKRFLDSLRLRMHLLAHSAGAKAFVCDQCGAQFSKEDALETHRQTHTGTDMAVFCLLCGKRFQAQSALQQHMEVHAGVRSYICSECNRTFPSHTALKRHLRSHTGDHPYECEFCGSCFRDESTLKSHKRIHTGEKPYECNGCDKKFSLKHQLETHYRVHTGEKPFECKLCHQRSRDYSAMIKHLRTHNGASPYQCTICTEYCPSLSSMQKHMKGHKPEEIPPDWRIEKTYLYLCYV

SEQ ID NO: 213 - DNA, 2197 bp, Homo sapiens
caggaagcccacccagccccgccacgcagagcccagaaggaaagaaagcctcatgcctgagccgaggggagcaccatggatctgacaaaaatgggcatgatccagctgcagaaccctagccaccccacggggctactgtgcaaggccaaccagatgcggctggccgggactttgtgcgatgtggtcatcatggtggacagccaggagttccacgcccaccggacggtgctggcctgcaccagcaagatgtttgagatcctcttccaccgcaatagtcaacactatactttggacttcctctcgccaaagaccttccagcagattctggagtatgcatatacagccacgctgcaagccaaggcggaggacctggatgacctgctgtatgcggccgagatcctggagatcgagtacctggaggaacagtgcctgaagatgctggagaccatccaggcctcagacgacaatgacacggaggccaccatggccgatggcggggccgaggaagaagaggaccgcaaggctcggtacctcaagaacatcttcatctcgaagcattccagcgaggagagtgggtatgccagtgtggctggacagagcctccctgggcccatggtggaccagagcccttcagtctccacttcatttggtctttcagccatgagtcccaccaaggctgcagtggacagtttgatgaccataggacagtctctcctgcagggaactcttcagccacctgcagggcccgaggagccaactctggctgggggtgggcggcaccctggggtggctgaggtgaagacggagatgatgcaggtggatgaggtgcccagccaggacagccctggggcagccgagtccagcatctcaggagggatgggggacaaggttgaggaaagaggcaaagaggggcctgggaccccgactcgaagcagcgtcatcaccagtgctagggagctacactatgggcgagaggagagtgccgagcaggtgccacccccagctgaggctggccaggcccccactggccgacctgagcacccagcacccccgcctgagaagcatctgggcatctactccgtgttgcccaaccacaaggctgacgctgtattgagcatgccgtcttccgtgacctctggcctccacgtgcagcctgccctggctgtctccatggacttcagcacctatggggggctgctgccccagggcttcatccagagggagctgttcagcaagctgggggagctggctgtgggcatgaagtcagagagccggaccatcggagagcagtgcagcgtgtgtggggtcgagcttcctgataacgaggctgtggagcagcacaggaagctgcacagtgggatgaagacgtacgggtgcgagctctgcgggaagcggttcctggatagtttgcggctgagaatgcacttactggctcattcagcgggtgccaaagcctttgtctgtgatcagtgcggtgcacagttttcgaaggaggatgccctggagacacacaggcagacccatactggcactgacatggccgtcttctgtctgctgtgtgggaagcgcttccaggcgcagagcgcactgcagcagcacatggaggtccacgcgggcgtgcgcagctacatctgcagtgagtgcaaccgcaccttccccagccacacggctctcaaacgccacctgcgctcacatacaggcgaccacccctacgagtgtgagttctgtggcagctgcttccgggatgagagcacactcaagagccacaaacgcatccacacgggtgagaaaccctacgagtgcaatggctgtgacaagaagttcagcctcaagcatcagctggagacgcactatagggtgcacacaggtgagaagccctttgagtgtaagctctgccaccagcgctcccgggactactcggccatgatcaagcacctgagaacgcacaacggcgcctcgccctaccagtgcaccatctgcacagagtactgccccagcctctcctccatgcagaagcacatgaagggccacaagcccgaggagatcccgcccgactggaggatagagaagacgtacctctacctgtgctatgtgtgaagggaggcccgcggcggtggagccgagcggggagccaggaaagaagagttggagtgagatgaaggaaggactatgacaaataaaaaaaaaaaaggaattc

SEQ ID NO: 214 - protein, 673 aa, Homo sapiens; identical to SEQ ID NO: 212

SEQ ID NO: 215 - DNA, 2197 bp, Homo sapiens; identical to SEQ ID NO: 213

SEQ ID NO: 216 - protein, 29 aa, Homo sapiens
REFEDRDRSHREEMEELLQEETRQKLNVS

SEQ ID NO: 217 - DNA, 89 bp, Homo sapiens; identical to SEQ ID NO: 131

SEQ ID NO: 218 - protein, 26 aa, Homo sapiens
EFEDRDRSHREEMEFKRAKANLDKNK

SEQ ID NO: 219 - DNA, 78 bp, Homo sapiens; identical to SEQ ID NO: 123

SEQ ID NO: 220 - protein, 34 aa, Homo sapiens; identical to SEQ ID NO: 124

SEQ ID NO: 221 - DNA, 102 bp, Homo sapiens; identical to SEQ ID NO: 125

SEQ ID NO: 222 - protein, 50 aa, Homo sapiens; identical to SEQ ID NO: 126

SEQ ID NO: 223 - DNA, 152 bp, Homo sapiens; identical to SEQ ID NO: 127

SEQ ID NO: 224 - DNA, 1353 bp, Homo sapiens; identical to SEQ ID NO: 128
  modified_base (941): a, c, t, g, other or unknown
  modified_base (1067): a, c, t, g, other or unknown
  modified_base (1077): a, c, t, g, other or unknown

SEQ ID NO: 225 - DNA, 744 bp, Homo sapiens; identical to SEQ ID NO: 129
  modified_base (326): a, c, t, g, other or unknown
  modified_base (614): a, c, t, g, other or unknown

SEQ ID NO: 226 - DNA, 60 bp, Homo sapiens; identical to SEQ ID NO: 75

SEQ ID NO: 227 - protein, 25 aa, Homo sapiens [sequence omitted]

SEQ ID NO: 228 - DNA, 300 bp, Homo sapiens
agctctccttgcagcccgagctgaccctaggcctccaccctggcaggaatcccaatttgcctccacttagtgagcggaagaatgtgctacagttgaaactccagcagcgccggacccgggaagaactggtgagccaagggatcatgccgcggtttggttttcagataggagttaggtatgagaacaagaagagagaaaacttggcgctgaccctgttatagtggttatagtggtgtccctaaagggaggaaatgatttcagcaaaactggttgaacagcggatgaagatatggaattcaa

SEQ ID NO: 229 - protein, 43 aa, Homo sapiens
KMRKMEDNQYSEAELSSFSTSHVPEELKQPLHRKSKSQVQIFP

SEQ ID NO: 230 - DNA, 916 bp, Homo sapiens
aaaatgaggaaaatggaagataatcaatattctgaagctgagctgtcttcttttagtacttcccatgtgccagaggaacttaagcagccgttacacagaaagtccaaatcgcaggtacagattttcccatagtacagcatcatggttacattatgcatgaaacgtacatttcctttgattaccaaaaagcaaatattctatctttgaaatattttagaatccaaatggggtcagatgcctttctaaaaatgttcatatctttactgtatttatgaccaaatccaaaatagttaagcaagaaagcaattaatttagctgcattctgtatagaaattttatgacaagccccatcctacacttatctttccttgactttgcaattctcttacttttgtacagttagttcatcatgtttgtttacaaatatttatgtattacctcagagtcattttccgtgtctatactttttgtcaatgtaattatattttaagatttttctgaaaagtgaattctattttttgtccccttctatgtctagtaaattgttaggtgtagttaattagcaagtcatctcatgttgtaatttaatagtaaaatgaggatcagcaaggaagtgagttgccaaaggtctacaccaacttactggcagatttggaaataaaacctgtcaatttaaattcaacaaatgaatgagtgaatgaatggtactcaaatttattaggctctacaacattgtatcagcactatggtaactaaaaataaatctatttaagggtccataaatagcaattaaaagagcctcagtgtttttgttacaaaataaaggaagtcggtacttttttgtttgacatccacactcaaccggattgttcattcaggtcaattaaaaataaagaaacttcctattaccaaaaaa

SEQ ID NO: 231 - protein, 268 aa, Homo sapiens
MFRMLNSSFEDDPFFSESILAHRENMRQMIRSFSEPFGRDLLSISDGRGRAHNRRGHNDGEDSLTHTDVSSFQTMDQMVSNMRNYMQKLERNFGQLSVDPNGHSFCSSSVMTYSKIGDEPPKVFQASTQTRRAPGGIKETRKAMRDSDSGLEKMAIGHHIHDRAHVIKKSKNKKTGDEEVNQEFINMNESDAHAFDEEWQSEVLKYKPGRHNLGNTRMRSVGHENPGSRELKRREKPQQSPAIEHGRRSNVLGDKLHIKGSSVKSNKK

SEQ ID NO: 232 - DNA, 1116 bp, Homo sapiens
gttatgtgttcccgtccgtactggaggctagctcttgtcgcggccgcggcgagttaacatcgtttttccaatctgtccgcggctgccgccacccaagacagagccagaatgttcaggatgctgaacagcagttttgaggatgaccccttcttctctgagtccattcttgcacaccgagaaaatatgcgacagatgataagaagtttttctgaaccctttggaagagacttgctcagtatctctgatggtagagggagagctcataatcgtagaggacataatgatggtgaagattctttgactcatacagatgtcagctctttccagaccatggaccaaatggtgtcaaatatgagaaactatatgcagaaattagaaagaaacttcggtcaactttcagtggatccaaatggacattcattttgttcttcctcagttatgacttattccaaaataggagatgaaccgccaaaggtttttcaggcctcaactcaaactcgtcgagctccaggaggaataaaggaaaccaggaaagcaatgagagattctgacagtggactagaaaaaatggctattggtcatcatatccatgaccgagctcatgtcattaaaaagtcaaagaacaagaagactggagatgaagaggtcaaccaggagttcatcaatatgaatgaaagcgatgctcatgcttttgatgaggagtggcaaagtgaggttttgaagtacaaaccaggacgacacaatctaggaaacactagaatgagaagtgttggccatgagaatcctggctcccgagaacttaaaagaagggagaaacctcaacaaagtccagccattgaacatggaaggagatcaaatgttttgggggacaaactccacatcaaaggctcatctgtgaaaagcaacaaaaaataaatagccatgcatttgatttgtttagttttgattgttttaacagttagtaatggtgctgggtaataagcataagaccaatctcttgctgttaaatcagttctgtccttggcaactttcttctgatatctgaatgttcatgaaggtcctagctttatattgtccctcttttaggaataaaattttgattttcaacaaaaaaaa

SEQ ID NO: 233 - protein, 268 aa, Homo sapiens; identical to SEQ ID NO: 231

SEQ ID NO: 234 - DNA, 1130 bp, Homo sapiens
agtgaggcgtcgtccgtactggaggctagctcttgtcgcggccgcggcgagttaacatcgtttttccaatctgtccgcggctgccaccacccaagacagagccagaatgttcaggatgctgaacagcagttttgaggatgaccccttcttctctgagtccattcttgcacaccgagaaaatatgcgacagatgataagaagtttttctgaaccctttggaagagacttgctcagtatctctgatggtagagggagagctcataatcgtagaggacataatgatggtgaagattctttgactcatacagatgtcagctctttccagacaatggaccaaatggtgtcaaatatgagaaactatatgcagaaattagaaagaaacttcggtcaactttcagtggatccaaatggacattcattttgttcttcctcagttatgacttattccaaaataggagatgaaccgccaaaggtttttcaggcctcaactcaaactcgtcgagctccaggaggaataaaggaaaccaggaaagcaatgagagattctgacagtggactagaaaaaatggctattggtcatcatatccatgaccgagctcatgtcattaaaaagtcaaagaacaagaagactggagatgaagaggtcaaccaggagttcatcaatatgaatgaaagtgatgctcatgcttttgatgaggagtggcaaagtgaggttttgaagtacaaaccaggacgacacaatctaggaaacactagaatgagaagtgttggccatgagaatcctggctcccgagaacttaaaagaagggagaaacctcaacaaagtccagccattgaacatggaaggagatcaaatgttttgggggacaaactccacatcaaaggctcatctgtgaaaagcaacaaaaaataaatagccatgcatttgatttgtttagttttgattgttttaacagttagtaatggtgctgggtaataagcataagaccaatctcttgctgttaaatcagttctgtccttggcaactttcttctgatatctgaatgttcatgaaggtcctagctttatattgtccctcttttaggaataaaattttgattttcaaaaaaaaaaaaaaaaaaaaaaaaaaa

SEQ ID NO: 235 - protein, 268 aa, Homo sapiens; identical to SEQ ID NO: 231

SEQ ID NO: 236 - DNA, 1116 bp, Homo sapiens; identical to SEQ ID NO: 232

SEQ ID NO: 237 - protein, 86 aa, Homo sapiens
TTTATLGFGAPQAPVVDREKQPSEGAFSENNAENESGGDKPPIDPNNPAANWLHARSTRKKRCPYTKHQTLELEKEFLFNMYLTRD

SEQ ID NO: 238 - DNA, 258 bp, Homo sapiens
actacgacagccactttgggctttggagccccccaggccccagtagttgatagagaaaaacaacccagcgaaggcgccttctctgaaaacaatgctgagaatgagagcggcggagacaagccccccatcgatcccaataacccagcagccaactggcttcacgcgcgctccactcggaaaaagcggtgcccctatacaaaacaccagaccctggaactggagaaagagtttctgttcaacatgtacctcaccagggac

SEQ ID NO: 239 - protein, 198 aa, Homo sapiens
MAGFSPWRRRQRRRRRRRRARHASRAAPELVGDLGSFLLLGSTFLSTGTTLPFITSVEIVSRYLCARGSGRAGHHGPGRARPAVATSAFPAQEPRVFLRSALPAGRLSPSTTHLHLVTADNPAANWLHARSTRKKRCPYTKHQTLELEKEFLFNMYLTRDRRYEVARLLNLTERQVKIWFQNRRMKMKKINKDRAKDE

SEQ ID NO: 240 - DNA, 597 bp, Homo sapiens
atggcagggttctctccttggcggcggcggcagcggcggaggcggcggcggcggcgggcgaggcacgcttcgcgggcagcaccagaactggtcggtgatttaggtagtttcctgttgttgggatccacctttctctcgacaggcacgacactgcccttcattacttcagttgaaatcgtctccaggtacctctgcgcgcgggggtcgggccgcgcggggcatcacggccctggtcgtgccaggcctgcggtggcaacctcggctttccctgctcaggagcctcgtgtctttctccgcagcgctttgccagccggccggctttccccttccaccacacacctccacctggtcacagcagataacccagcagccaactggcttcatgcgcgctccactcggaaaaagcggtgcccctatacaaaacaccagaccctggaactggagaaagagtttctgttcaacatgtacctcaccagggaccgcaggtacgaggtggctcgactgctcaacctcaccgagaggcaggtcaagatctggttccagaaccgcaggatgaaaatgaagaaaatcaacaaagaccgagcaaaagacgagtga

SEQ ID NO: 241 - protein, 198 aa, Homo sapiens; identical to SEQ ID NO: 239

SEQ ID NO: 242 - protein, 268 aa, Homo sapiens [sequence omitted]

SEQ ID NO: 243 - DNA, 6671 bp, Homo sapiens
cgttctcctctctttctcctctcctcctggaataccttactgggcctggtggcttcccttcttgaccatttgcggcccctggggcactctgttgcactggcgggcgcaggttcctaggggctgggctgggccgggccaggcgcgatggcagggttctctccttggcggcggcggcagcggcggaggcggcggcggcggcgggcgaggcacgcttcgcgggcagcaccagaactggtcggtgatttaggtagtttcctgttgttgggatccacctttctctcgacaggcacgacactgcccttcattacttcagttgaaatcgtctccaggtacctctgcgcgcgggggtcgggccgcgcggggcatcacggccctggtcgtgccaggcctgcggtggcaacctcggctttccctgctcaggagcctcgtgtctttctccgcagcgctttgccagccggccggctttccccttccaccacacacctccacctggtcacagcaggtagggttaggttggctgctccttcgcggacgccgggggcgtggtaggaattctgggctttgggcattcaaggtcaggggcgcccgcttccatcctgagcctcccactggaggctgcgcctgcccagggacctcctgccattctcttgtaaggctggaacacacacacacacacacacacacacacacacacacacacacacacaccagtcccgggtgtgagctcaggaaagaacctccttccagtggagactcaggctggactaggaaggatagggcaggctgggatcctggccttgtcacttacccttctctctgtaagctcggccgctgctaggagtcgcctctcttttcttccttcttttccctgtcttcccttcctcttttatctcttctttctttttttcttctttcctttgctccttcctgctttcttttcttccgttggtctttttttcatcttccgtctctgccagattctatctcacctccttatctccttcccaaagcatccttggggaggggcccagagctggcttcaggagagcctagggggtctcactttcctctgcggctcaagtagaggttgggaagtctgccgaggaagggcccgcgtggggcggctgccgagggcggtgggtttgggcctggtgtgttactctgcagacaaggcctcggttatgatcacgaccggatggcggcagccttgcgtttcttcgcctgtcgctaacggctgactaggagatctgattaggggacattcgctgcagctttgtgtgcccatatcgagggcagggagccttcgccagcctcactggggactggagctgagcccaacagcctcgctggagcctggccattcgctgggaagctcttagctggctcttccggctgccggtcactagcttggggtttgaccgcattgagggagactggctagggcaaagcttgactgcttgcttactagtggcttccattaggtacaaaatatgttccatacagcaccttcgtgcagctgggtgctgaggagaaggggacccttccaagagccagtatgttttaaatgggcaaaaagaatcccaaattccagagccattgatataaacttgagtcatcgttccaaattgtagtctacagatgggagccagtctgaccattttccctacagaaaacagaaaacaaactatctctccctactcccaacacacacagttacagattcgtgcccacaaagctgtttcctttccctgcctggactggaggcccaggaactctttcgttgcacagccaccgacctgctgtctgaaaggaccacacaccccattcccttcaactcctccctgccattttctggaccaggcattggatttatttcagagatcacagtttcagaaatctcagtcgagaagggccgttttaaattatactcatttattatttctttatcgatacgcaatctctttcacttcgaaaataaaagcagacaaaaaagtcagactattctggctccaaacctttggctgaaggaagacaatatttggttttctgatttttctccgctttctaggcaccagtaacatctgcttaacactcaacgcctgctaattgttcagtaactctcttattttggggctaaggctgtttaaaggaacagcttttttacttaaaaaatactgaaataatcagtgtcttctcaggcataaaacgtggaaaaggcatccagacatgcccagcccatttgcagacacttaaaattgggagccagggtttcctccagggttaattttttaaatgaaaatctcagaggctggcggactgcggggtatttaggacacggtggactgtggtgggggtgggcatgacctagaggaatttatggggcaaggaaaaatattagggggagggagatgaggcggacaggacggggccatttcggagttcattgtgtcggccacttccctcttccaggcgcgggtgcaggaaggggcacccagtcggtatccgcccgcttggcagcctcgctggtatttgggagtccccgccggaagtgtgtcagggtgtttgagggggggattactggaactgctggtgaggatgaaggcaaaagagagagagagagatggacgcgcccgaggccgccagcctcgccgccagggaagtgggctaatgaaaaacacactgttgcaggcacagtatccacacgtgaatttgattacccctgttctaggagtcgctgctttctgttaggaattgggggcagggggagtttccttccaattaacggagtggcggcgaccttttaatttaccccaacgggtgagaaataaacttccccaacgtgccaggcccaggaatgggactggagtcgatgcccttttacccctccccgttctaatttccagccctggccttgagctgtggctgcctctctttgggtccttgtacctctccgccgagtctccgggccccgtaggtaaccaagcgaggcccggagtagcagctggaaagggaggaaggagccctgaaagcgtcacgcggccccgggacaggccacatcggtgcgggcctcccaggttccggagctgcggggtctcttaggcgaggctgccttttcccaaaccgaacttgccttccattcatgccacttgtagttttttcccagctgggattcacggagcgcaaccaggcttgcagcgctcatggttagagcctctgaggctggagcacaggctgggtcgcagcccctgcgcctgggaatcctgattgccagctgatgagaaaggcgggctgggcgcgcgtgtggctggggtcgagggccggggaccgagcgcgccgcacaaccaaccaggccctcaaacccttcgccctggtggcgctggcgtccctcctggccagctcctccgtggggtcctcgtagcaaaggcgaatttaagggttgcccgggcgcccctcgctccaggcgggtagctgtggggacctacacccgcggtactccctgagcggccggtccctgcctggagtgccctggtagggccggcggcggctccgtttgggacggatcctgcgttgaatttgacttttcgagggcggccgcgggtaaactcgcctctcccggggaccgcagggattatttacagggagctcgccaaccaaacacaacagtctaacctttccaagtcctcgtaaatttttacagctgggagccacggcaggcaaacgaatctgttggtcgtttccgacttcccgccagcctgtgtggcttctgaaacaataactccttatgaaatatcataaatatagatttaaatacagtagagcgacaatgcgatttggctgcttttttatggcttcaattattgtctaattttatgtgaggggctccgctggccgcactcgcgcacggacccgcgccttcttgatggcgtgattaattgtgatataaaatagtccgcttaagaagtgtgtgtatgggggggggagacgggagagtacagagacaaggccagatttgatcttttaatcgtcgttggccacaattaaaacaaaccccatcgtagagcggcacgatccctttacataaaaacatatggcttttgctataaaaattatgactgcaaaacaccggaccattaatagcgtgcggagtgatttacgcgttattgttctgctggacgggcagctgacgcgcacggccaatgggcgcgggcgccggcaacttattaggtgactgtacttcccccccggtgccaccaagttgttacatgaaatctgcagtttcataatttccgtgggtcgggccgcgcgggccaggcgctgggcacggtgatgcaccactggggcctgggcaactactacgtggactcgttcctgctgggcgccgacgccgcggatgagctgagcgttggcgctatgcgccggggaccctggccacctccccggcaggcggcgacgctggccgagcaccccgacttcagcccgtgcagcttccagtccaaggcgacggtgtttggcgcctcgtggaacccagtgcacgcgcgggcgccaacgctgtacccgctggtgtaccaccaccatcaccaccacccctacgtgcacccccaggcgccgtggcggcgcggcgcggacggcaggtacatgcgctcctgctggagcccaacgcccggtgcgctctccttcgcgggcttgccctccagccggccttatggcattaaacctgaaccgctgtcggccagaaggggtgactgtcccacgcttgacactcacactttctccctgactgactatgcttgtggttctcctccagttgatagagaaaaacaacccagcgaaggcgccttctctgaaaacaatgctgagaatgagagcggcggagacaagccccccatcgatcccagtaagtgtctcctcccttcaaatcccgcccggcctccacgccggctcccggatctgctggcccgccaggtttctctcgagttggggccaggagccagaagttggtgtttgggacgcctcagatagggccccaagtctggagagcagtgaagagcggcccgcagggctacggggggggaggcggctgctgcagcaagagggggcgggagggcacttcgggacgagccaagactggccgcccctctccttccctgcccaggcccaggaccgagatactttgggccgttcttcgaaaagtccagtgcagcccagagagccttttgtacaactagattgtcgtgaggcggccagccagggacgccggagctgggagctcggggagacgggccgattccttccacttctttctcggccagtggcgggcgtaaatcctgccaagatgaggctgcgggcgacccgggccacaagggtccccatgacagattattcaaataagccacagacgtgatcagcggccttaggggccctgacggcttgccagctccgaagccttccaggaaggttaaataaggagtggggggcgtagagggacaggttgggaaagaaagacgaaggagtgaacgggacagaggaatcctaatcttgctacagaacacaaggcagcatgctttccctctgcgtggcaaggagacctgtttccaaatttcattctatacagcgttttgagagtgggaggaaggagaagggggacaagaggacagagtaggagaaaggaaggtctcggaggggaagggcgagccaaagttttactgcgtgcaattttaagtgactgtctgtgcgtctgtctgccagggttccattgtgtccgaggcctgactgcctttcctaaccagttcagcagagttctgcacttcggccagagaccccatgcaggaggctcatttgcccagcgggatgtgcgtcttctgctcctaaacccagtgtttctcttccccgcagataacccagcagccaactggcttcatgcgcgctccactcggaaaaagcggtgcccctatacaaaacaccagaccctggaactggagaaagagtttctgttcaacatgtacctcaccagggaccgcaggtacgaggtggctcgactgctcaacctcaccgagaggcaggtcaagatctggttccagaaccgcaggatgaaaatgaagaaaatcaacaaagaccgagcaaaagacgagtgatgccatttgggcttatttagaaaaaagggtaagctagagagaaaaagaaagaactgtccgtcccccttccgccttctcccttttctcacccccaccctagcctccaccatccccgcacaaagcggctctaaacctcaggccacatcttttccaaggcaaaccctgttcaggctggctcgtaggcctgccgctttgatggaggaggtattgtaagctttcattttctataagaaaaaggaaaagttgagggggggcattagtgctgatagctgtgtgtgttagcttgtatatatatttttaaaaatctacctgttcctgacttaaaacaaaaggaaagaaactacctttttataatgcacaactgttgatggtaggctgtatagtttttagtctgtgtagttaatttaatttgcagtttgtgcggcagattgctctgccaagatacttgaacactgtgttttattgtggtaattatgttttgtgattcaaacttctgtgtactgggtgatgcacccattgtgattgtggaagatagaattc

SEQ ID NO: 244 - protein, 76 aa, Homo sapiens
RPMPRLEPTFEIDEEEEEEDENELFPREYFRRLSSQDVLRCQSSSKRKSKDEEEDEESDDADDGNNWEHKSIWTAL

SEQ ID NO: 245 - DNA, 415 bp, Homo sapiens
gaggccaatgccaagattagaacccacatttgagatcgatgaagaagaggaggaagaggatgaaaatgaacttttccctagagaatacttccgtcgtttgtcttcgcaggatgtactcaggtgtcagtcctcttctaagaggaagtctaaagatgaagaagaagatgaagagtcagatgatgctgatgatgggaataactgggaacacaagtccatttggacagccctttagtcaagctggagggcagccaatgggagccactggagtgaacccccagttagccagcaaacagagcatggtcaacagtttgcccaccttccctacagatatcaagaatacttcagtcaccaacgtgccaaatatgtctcagatgcaaacatcagtgggaattgtacccacacaagcaattgcaac

SEQ ID NO: 246 - protein, 68 aa, Homo sapiens
MAENLLDGPPNPKRAKLSSPGFSANDSTDTPILKPVSLLRKRDVKNSPLEPDTSTPLKKKKGWPKGKS

SEQ ID NO: 247 - DNA, 229 bp, Homo sapiens
gggctgttttcgcgagcaggtgaaaatggctgagaacttgctggacggaccgcccaaccccaaaagagccaaactcagctcgcccggtttctcggcgaatgacagcacagacactcctatcttaaagccagtatctcttttgcgaaaacgtgatgtgaagaattctcctcttgagccagatacatccacacctttgaaaaagaaaaagggatggcccaaaggcaagagc

SEQ ID NO: 248 - protein, 376 aa, Homo sapiens
RPMPRLEPTFEIDEEEEEEDENELFPREYFRRLSSQDVLRCQSSSKRKSKDEEEDEESDDADDFGSLFDLENDLPDELIPNGGELGLLNSGNLVPDAASKHKQLSELLRGGSGSSINPGIGNVSASSPVQQGLGGQAQGQPNSANMASLSAMGKSPLSQGDSSAPSLPKQAASTSGPTPAASQALNPQAQKQVGLATSSPATSQTGPGICMNANFNQTHPGLLNSNSGHSLINQASQGQAQVMNGSLGAAGRGRGAGMPYPTPAMQGASSSVLAETLTQVSPQMTGHAGLNTAQAGGMAKMGITGNTSPFGQPFSQAGGQPMGATGVNPQLASKQSMVNSLPTFPTDIKNTSVTNVPNMSQMQTSVGIVPTQAIAT

SEQ ID NO: 249 - DNA, 1128 bp, Homo sapiens
gaggccaatgccaagattagaacccacatttgagatcgatgaagaagaggaggaagaggatgaaaatgaacttttccctagagaatacttccgtcgtttgtcttcgcaggatgtactcaggtgtcagtcctcttctaagaggaagtctaaagatgaagaagaagatgaagagtcagatgatgctgatgattttggatcattgtttgacttggaaaatgatcttcctgatgagctgatacccaatggaggagaattaggccttttaaacagtgggaaccttgttccagatgctgcttccaaacataaacaactgtcggagcttctacgaggaggcagcggctctagtatcaacccaggaataggaaatgtgagcgccagcagccccgtgcagcagggcctgggtggccaggctcaagggcagccgaacagtgctaacatggccagcctcagtgccatgggcaagagccctctgagccagggagattcttcagcccccagcctgcctaaacaggcagccagcacctctgggcccacccccgctgcctcccaagcactgaatccgcaagcacaaaagcaagtggggctggcgactagcagccctgccacgtcacagactggacctggtatctgcatgaatgctaactttaaccagacccacccaggcctcctcaatagtaactctggccatagcttaattaatcaggcttcacaagggcaggcgcaagtcatgaatggatctcttggggctgctggcagaggaaggggagctggaatgccgtaccctactccagccatgcagggcgcctcgagcagcgtgctggctgagaccctaacgcaggtttccccgcaaatgactggtcacgcgggactgaacaccgcacaggcaggaggcatggccaagatgggaataactgggaacacaagtccatttggacagccctttagtcaagctggagggcagccaatgggagccactggagtgaacccccagttagccagcaaacagagcatggtcaacagtttgcccaccttccctacagatatcaagaatacttcagtcaccaacgtgccaaatatgtctcagatgcaaacatcagtgggaattgtacccacacaagcaattgcaac

SEQ ID NO: 250 - protein, 2004 aa, Homo sapiens
MVKLANPLYTEWILEAIKKVKKQKQRPSEERICNAVSSSHGLDRKTVLEQLELSVKDGTILKVSNKGLNSYKDPDNPGRIALPKPRNHGKLDNKQNVDWNKLIKRAVEGLAESGGSTLKSIERFLKGQKDVSALFGGSAASGFHQQLRLAIKRAIGHGRLLKDGPLYRLNTKATNVDGKESCESLSCLPPVSLLPHEKDKPVAEPIPICSFCLGTKEQNREKKPEELISCADCGNSGHPSCLKFSPELTVRVKALRWQCIECKTCSSCRDQGKNADNMLFCDSCDRGFHMECCDPPLTRMPKGMWICQICRPRKKGRKLLQKKAAQIKRRYTNPIGRPKNRLKKQNTVSKGPFSKVRTGPGRGRKRKITLSSQSASSSSEEGYLERIDGLDFCRDSNVSLRFNKKTKGLIDGLTKFFTPSPDGRKARGEVVDYSEQYRIRKRGNRKSSTSDWPTDNQDGWDGKQENEERLFGSQEIMTEKDMELFRDIQEQALQKVGVTGPPDPQVRCPSVIEFGKYEIHTWYSSPYPQEYSRLPKLYLCEFCLKYMKSRTILQQHMKKCGWFHPPANEIYRKNNISVFEVDGNVSTIYCQNLCLLAKLFLDHKTLYYDVEPFLFYVLTQNDVKGCHLVGYFSKEKHCQQKYNVSCIMILPQYQRKGYGRFLIDFSYLLSKREGQAGSPEKPLSDLGRLSYMAYWKSVILECLYHQNDKQISIKKLSKLTGICPQDITSTLHHLRMLDFRSDQFVIIRREKLIQDHMAKLQLNLRPVDVDPECLRWTPVIVSNSVVSEEEEEEAEEGENEEPQCQERELEISVGKSVSHENKEQDSYSVESEKKPEVMAPVSSTRLSKQVLPHDSLPANSQPSRRGRWGRKNRKTQERFGDKDSKLLLEETSSAPQEQYGECGEKSEATQEQYTESEEQLVASEEQPSQDGKPDLPKRRLSEGVEPWRGQLKKSPEALKCRLTEGSERLPRRYSEGDRAVLRGFSESSEEEEEPESPRSSSPPILTKPTLKRKKPFLHRRRRVRKRKHHNSSVVTETISETTEVLDEPFEDSDSERPMPRLEPTFEIDEEEEEEDENELFPREYFRRLSSQDVLRCQSSSKRKSKDEEEDEESDDADDTPILKPVSLLRKRDVKNSPLEPDTSTPLKKKKGWPKGKSRKPIHWKKRPGRKPGFKLSREIMPVSTQACVIEPIVSIPKAGRKPKIQESEETVEPKEDMPLPEERKEEEEMQAEAEEAEEGEEEDAASSEVPAASPADSSNSPETETKEPEVEEEEEKPRVSEEQRQSEEEQQELEEPEPEEEEDAAAETAQNDDHDADDEDDGHLESTKKKELEEQPTREDVKEEPGVQESFLDANMQKSREKIKDKEETELDSEEEQPSHDTSVVSEQMAGSEDDHEEDSHTKEELIELKEEEEIPHSELDLETVQAVQSLTQEESSEHEGAYQDCEETLAACQTLQSYTQADEDPQMSMVEDCHASEHNSPISSVQSHPSQSVRSVSSPNVPALESGYTQISPEQGSLSAPSMQNMETSPMMDVPSVSDHSQQVVDSGFSDLGSIESTTENYENPSSYDSTMGGSICGNSSSQSSCSYGGLSSSSSLTQSSCVVTQQMASMGSSCSMMQQSSVQPAANCSIKSPQSCVVERPPSNQQQQPPPPPPQQPQPPPPQPQPAPQPPPPQQQPQQQPQPQPQQPPPPPPPQQQPPLSQCSMNNSFTPAPMIMEIPESGSTGNISIYERIPGDFGAGSYSQPSATFSLAKLQQLTNTIMDPHAMPYSHSPAVTSYATSVSLSNTGLAQLAPSHPLAGTPQAQATMTPPPNLASTTMNLTSPLLQCNMSATNIGIPHTQRLQGQMPVKGHISIRSKSAPLPSAAAHQQQLYGRSPSAVAMQAGPRALAVQRGMNMGVNLMPTPAYNVNSMNMNTLNAMNSYRMTQPMMNSSYHSNPAYMNQTAQYPMQMQMGMMGSQAYTQQPMQPNPHGNMMYTGPSHHSYMNAAGVPKQSLNGPYMRR

SEQ ID NO: 251 - DNA, 7869 bp, Homo sapiens
ggcacgaggtttggggcatctccgcggtccggcccggggccccgggatctcggctgtccttcctcccggcataagatgcacatttttctgctctggagccgggaatgaaatattcttgagttcttacaactttatgacgagacccatgtgtggtgctattgagaaattcattgggaagttggaagacatttcaaacaacaggttgttttggtttctatagtacaattggggtggcattctgttttgtgaaaggaggaaggacttaggccagaaaactcatatgctatggttaactggttcccagcctccgagaatcttgttttccatggtgtaaaacttactcagcatcaggataagggataacgactctatggatatacagaatccttcaccatggtaaaactcgcaaacccgctttatactgagtggattttggaggccatcaaaaaagtgaaaaagcagaaacagcgtccttcagaagaaaggatatgcaatgctgtgtcttcatcccatggcttggatcgtaaaactgttttagaacaattggagttgagtgttaaagatggaacaattttaaaagtctcaaataaaggactcaattcctataaagatcctgataatcctgggcgaatagcacttcctaagcctcggaaccatggaaaattggataataaacaaaatgtggattggaataaactgataaagcgggcagttgagggcttggcagagtctggtggctcaactttgaaaagcattgaacgttttttgaaaggtcagaaggatgtgtctgcattattcggaggcagtgctgcctctggctttcaccagcagttacgattggctatcaaacgtgccattggccacggcagactccttaaagatggacctctttatcggctcaacactaaagcaaccaacgtggatgggaaagagagttgtgagtctctttcctgtttacctccagtgtcccttcttccacatgaaaaggataagccggttgctgaaccaatccccatctgtagtttctgtcttggtacaaaagaacaaaaccgagaaaagaagccagaggaactcatctcctgtgccgactgtggcaacagtggccatccatcctgtttaaagttttcccctgaactaacggttcgagtgaaggccttacggtggcagtgcatcgagtgtaaaacatgcagctcctgtcgagatcaaggcaaaaatgcggataacatgctcttttgtgattcatgtgaccgaggttttcacatggagtgttgtgatccgccactcacccgtatgccaaaaggcatgtggatatgtcaaatatgtcgacctaggaaaaaaggacgaaaacttctacaaaagaaggcagcacagataaaacggcgctatactaatccaataggacgtccaaaaaacaggttaaagaaacaaaacacggtatcaaaaggtcccttcagcaaagttcgaactggccctggaaggggtaggaaacgaaaaatcactctttccagccaatcagcatcatcatcatcagaagaaggatatttagagcggatagatggcttggacttctgcagagatagcaatgtctccttgaggttcaacaagaaaaccaaagggctcattgatggccttaccaaattttttaccccttcccctgatgggcggaaagctcggggggaagtggtggactactctgagcaatatcgaatcagaaagaggggcaacaggaaatcaagcacttcagattggcccacagacaatcaggatggctgggatggcaaacaagaaaatgaggagcgactttttgggagccaggaaatcatgactgagaaagatatggaattatttcgtgatatccaagaacaagcactgcagaaagttggagtgactggtccccctgatccacaagtccgctgtccctctgtcattgagtttgggaagtatgaaattcacacctggtactcctccccatatcctcaagaatactcaaggctgcccaaattgtatctttgtgaattttgtctaaaatatatgaaaagtagaactattctgcagcagcacatgaagaaatgtggttggttccatcctcctgccaatgagatttacagaaagaataatatttctgtctttgaggttgatgggaatgtgagtaccatttattgtcaaaacctgtgtcttttggcaaagttgtttcttgaccacaaaaccctctattacgatgtggagccatttcttttttatgtactaacacagaatgatgtcaagggctgccaccttgttggctacttttctaaggaaaagcactgccaacagaagtacaatgtttcctgtataatgattcttcctcaataccagcgtaagggctatggcaggtttctcatcgatttcagttatttgttatcaaagcgtgaaggccaagcagggtctccagagaaaccgttatctgatctgggtcgtctttcctacatggcatattggaaaagtgtaatattggagtgcctttatcaccaaaatgacaagcagatcagcattaagaagttaagcaagttgactggaatctgccctcaagacatcacttccacactccaccacctacgaatgctggacttccgtagtgaccaatttgtgattatccgccgggaaaaacttatccaggatcacatggcaaagcttcagctgaatttgcgacctgtagatgtagatccagaatgtttgcgctggactccagtcatagtgtccaactctgtggtctcagaggaggaagaagaggaggctgaggaaggagaaaacgaagagccacagtgccaggaaagagaattagagatcagtgtgggaaagtctgtgtctcatgagaacaaagaacaagattcttattcagtagaaagtgaaaagaaaccagaagttatggctccagtcagttctacacgtttgagcaaacaagtccttcctcatgatagtcttcctgcaaatagccagccatctcggaggggccgctgggggaggaagaacagaaaaacccaggaacgttttggtgataaagattctaaactgctcttggaagagacgtcttcagctcctcaggaacaatatggagaatgtggggagaaatcagaagccacccaggaacaatacactgaaagtgaagaacagctggtggcttctgaggagcagccaagccaggacgggaaacctgaccttcccaagagaagactcagtgagggggttgagccctggcgaggacagctcaagaaaagccctgaggctctgaagtgcagattaacagaaggaagtgagaggctgccccgtcgctacagtgagggtgacagggctgtcctcaggggcttcagtgagagcagcgaggaggaggaggagccggaaagccctcggtcaagctcgccaccaattctcacaaagcccacgctgaagcgaaagaaaccatttctccaccgaaggaggagagtccgaaagcgcaaacaccacaatagcagtgtagtcacagaaactatttctgagaccactgaagtgttagatgaaccttttgaagattctgactccgagaggccaatgccaagattagaacccacatttgagatcgatgaagaagaggaggaagaggatgaaaatgaacttttccctagagaatacttccgtcgtttgtcttcgcaggatgtactcaggtgtcagtcctcttctaagaggaagtctaaagatgaagaagaagatgaagagtcagatgatgctgatgacactcctatcttaaagccagtatctcttttgcgaaaacgtgatgtgaagaattctcctcttgagccagatacatccacacctttgaaaaagaaaaagggatggcccaaaggcaagagccgcaaaccaatccactggaagaaaagacctggtcgaaaaccaggatttaagttgagtcgggaaatcatgccagtttctactcaagcatgcgtcattgagcccatcgtttccattcctaaagctggacgtaaacccaagatccaggagagtgaagaaactgttgagccaaaagaagacatgcccctacccgaggagaggaaggaggaggaggagatgcaagcagaggcagaagaggctgaagagggtgaggaagaggatgcagccagcagtgaagtcccagcagcctctccagcagacagcagcaatagtcctgagaccgaaaccaaggagcctgaggtggaggaggaagaagagaagccccgtgtctcagaggagcagaggcagtcagaggaggagcagcaggaattagaggagccagagccagaggaggaggaagatgcagctgcagagactgcccagaatgacgaccacgacgctgatgatgaggatgatggccacctggagtccacaaagaaaaaggagctagaggaacagcccacgagggaagatgtcaaggaggagcctggtgttcaagagtcttttttagatgctaatatgcagaagagtagggaaaagataaaggataaagaggaaaccgagctggattccgaagaggagcagccttcccatgacacgtccgtggtgtcagagcagatggctgggtctgaggacgaccacgaagaagactcccacactaaggaagagttaatcgaattaaaagaggaggaagagattcctcatagtgagctggatctggaaactgtacaggcagtgcagtctttgactcaagaagaaagcagtgagcatgagggcgcctaccaggactgtgaggaaactcttgcggcgtgtcagaccctgcagagttacacccaggctgacgaggaccctcagatgtccatggttgaagactgtcatgcgtcagaacataatagccctatctcctccgttcagtctcaccccagccagtcagtccgttcggtcagcagtcccaacgtgcctgcccttgagagtggctacacccagatcagcccagaacaaggatccctgtccgcaccctctatgcagaacatggagaccagccccatgatggatgtgccttccgtatcagaccactctcagcaggtggtggacagcggcttcagtgacctgggcagcattgagagcaccactgaaaactatgagaacccaagcagttacgactccacgatgggcggcagcatctgtgggaacagctcttcccagagcagctgctcctacggtgggctgtcgtcctccagcagcctcacccagagcagctgtgtggtcactcagcagatggccagcatgggcagcagctgcagcatgatgcagcagagcagcgtccagcctgctgccaactgcagcatcaagtcacctcagagctgcgtggtggagaggcctcccagtaaccagcagcagcagccgccaccaccgcctccacagcagccacagccgccgccgccacaaccacaaccagcaccacagcctccaccaccccagcagcagccgcaacagcagccgcagcctcagccccagcagcctccacccccaccccctccccagcagcagcccccgctgtcacagtgtagtatgaataacagtttcaccccagctcctatgatcatggagataccagaatctggaagcactgggaacataagtatctatgagaggattccaggggattttggtgccggcagctactctcaaccatcagccaccttcagcctagccaagctgcagcagctgaccaacaccattatggaccctcatgccatgccttatagccattctcctgctgtgacttcctatgcaaccagtgtttctctgtccaatacaggactggctcagctggctccatctcatcccttagctgggactcctcaagcacaagccaccatgacgccacccccaaacttggcatccactaccatgaacctcacatctcctctgcttcagtgcaacatgtctgccaccaacattggcattcctcacacgcagagattgcaagggcaaatgccagtgaaggggcacatttccatccgctccaagtctgcgccactgccctctgcggctgctcaccagcagcagctgtatggccgtagcccatcggcagttgccatgcaggctggccctcgcgcactggctgttcagcgtggcatgaacatgggggttaatctgatgcctactcccgcctataatgtcaattccatgaatatgaacaccttgaatgccatgaacagctatcgaatgacacagcccatgatgaacagcagttaccatagtaaccctgcctacatgaaccagacagcacagtatcctatgcagatgcagatgggaatgatggggagccaggcctatacccagcagcctatgcagcctaaccctcatgggaacatgatgtacacaggcccctcccatcacagctacatgaacgctgctggcgtgcccaagcagtcactcaacggaccttacatgagaagatgagcaagatgaacttgcaatcaaaaacttaaatatatataaataaaggaaccttttatactgacaaaccagagaaaaatggacctttttccagttaaaatattgctgtagatttagaggaatttttctttggtttattttattttttagaaaacctgatcttctcttttttttgggttcattttgttgtgggttttggttttcttcacaatcttgaacattttacagtagaactcatctaaaaatggatttggggatggggaaacatgcacaaaatcttttcataattaaaaagagccttactttctttacataccacatggacagaatttgtgtaaaagtgaattatctttattttaaaatgtatgtttcccctcactgtttgcagctcccaatgttgtcatttttaaatgttatatacatctcaagggttaaccagaccctttcctccaaacccaacctttcatttcctacttcattccagcaggaggcacttaggggagactcggatggggacatggagaacaacccaagctccttaaacttattattattgttaatattattattattattattaataaagtgaggcaggaaaatgcttctccttttaaaatcccctccactcctcacacacacacacctcttgaaacccttccccaagaatgtttctttatagacggacttcattgaaatctttgttgttcttgaatcaagtgtaatataatttttttcttcttttttaaaatattcccactcagcactcagagacacaaaaatactgtaagtctcaattaacagcagaatctcagagaaaagctgtttgcaatccaaatccagcctttggaggaatagagatggtcaattaacaatcaaaaagaggagattaacctcttgtttttttaccacctggtgaatcagccataacgcacacacacgccacccagcctcttgtttctagtatgtactttgaaatgctaactgagggtcttgatgcttgagcctttgactgataaaactcaaatagcagtccccagtgatttgcctcttaggttctttcttaaattgttggtggatgactgtacattttagtgatttgaaaaataactgacaaaccattgaaacagtttattttatgttggaagagatggcgcagatgtgtgtcagaagggagatcacggtgtgagtttcgtagctatttaagtgatacatacctctagtttttgtatgtcttttgagatcctgagttcatcccctgtgaatcagagtgcacaagcacctctcctgtgagtggctaatgagaagagggacagaccgaccaccagcacagtagggcagatctggacagcagaatgttataacgcaagttcatgtgttgctcccaactccattctcttttctctcgtgcaaccagtttgcccattctcttcctattacttgctccagggataggtaaaaaaaaaa

SEQ ID NO: 252 - protein, 2442 aa, Homo sapiens
MAENLLDGPPNPKRAKLSSPGFSANDSTDFGSLFDLENDLPDELIPNGGELGLLNSGNLVPDAASKHKQLSELLRGGSGSSINPGIGNVSASSPVQQGLGGQAQGQPNSANMASLSAMGKSPLSQGDSSAPSLPKQAASTSGPTPAASQALNPQAQKQVGLATSSPATSQTGPGICMNANFNQTHPGLLNSNSGHSLINQASQGQAQVMNGSLGAAGRGRGAGMPYPTPAMQGASSSVLAETLTQVSPQMTGHAGLNTAQAGGMAKMGITGNTSPFGQPFSQAGGQPMGATGVNPQLASKQSMVNSLPTFPTDIKNTSVTNVPNMSQMQTSVGIVPTQAIATGPTADPEKRKLIQQQLVLLLHAHKCQRREQANGEVRACSLPHCRTMKNVLNHMTHCQAGKACQVAHCASSRQIISHWKNCTRHDCPVCLPLKNASDKRNQQTILGSPASGIQNTIGSVGTGQQNATSLSNPNPIDPSSMQRAYAALGLPYMNQPQTQLQPQVPGQQPAQPQTHQQMRTLNPLGNNPMNIPAGGITTDQQPPNLISESALPTSLGATNPLMNDGSNSGNIGTLSTIPTAAPPSSTGVRKGWHEHVTQDLRSHLVHKLVQAIFPTPDPAALKDRRMENLVAYAKKVEGDMYESANSRDEYYHLLAEKIYKIQKELEEKRRSRLHKQGILGNQPALPAPGAQPPVIPQAQPVRPPNGPLSLPVNRMQVSQGMNSFNPMSLGNVQLPQAPMGPRAASPMNHSVQMNSMGSVPGMAISPSRMPQPPNMMGAHTNNMMAQAPAQSQFLPQNQFPSSSGAMSVGMGQPPAQTGVSQGQVPGAALPNPLNMLGPQASQLPCPPVTQSPLHPTPPPASTAAGMPSLQHTTPPGMTPPQPAAPTQPSTPVSSSGQTPTPTPGSVPSATQTQSTPTVQAAAQAQVTPQPQTPVQPPSVATPQSSQQQPTPVHAQPPGTPLSQAAASIDNRVPTPSSVASAETNSQQPGPDVPVLEMKTETQAEDTEPDPGESKGEPRSEMMEEDLQGASQVKEETDIAEQKSEPMEVDEKKPEVKVEVKEEEESSSNGTASQSTSPSQPRKKIFKPEELRQALMPTLEALYRQDPESLPFRQPVDPQLLGIPDYFDIVKNPMDLSTIKRKLDTGQYQEPWQYVDDVWLMFNNAWLYNRKTSRVYKFCSKLAEVFEQEIDPVMQSLGYCCGRKYEFSPQTLCCYGKQLCTIPRDAAYYSYQNRYHFCEKCFTEIQGENVTLGDDPSQPQTTISKDQFEKKKNDTLDPEPFVDCKECGRKMHQICVLHYDIIWPSGFVCDNCLKKTGRPRKENKFSAKRLQTTRLGNHLEDRVNKFLRRQNHPEAGEVFVRVVASSDKTVEVKPGMKSRFVDSGEMSESFPYRTKALFAFEEIDGVDVCFFGMHVQEYGSDCPPPNTRRVYISYLDSIHFFRPRCLRTAVYHEILIGYLEYVKKLGYVTGHIWACPPSEGDDYIFHCHPPDQKIPKPKRLQEWYKKMLDKAFAERIIHDYKDIFKQATEDRLTSAKELPYFEGDFWPNVLEESIKELEQEEEERKKEESTAASETTEGSQGDSKNAKKKNNKKTNKNKSSISRANKKKPSMPNVSNDLSQKLYATMEKHKEVFFVIHLHAGPVINTLPPIVDPDPLLSCDLMDGRDAFLTLARDKHWEFSSLRRSKWSTLCMLVELHTQGQDRFVYTCNECKHHVETRWHCTVCEDYDLCINCYNTKSHAHKMVKWGLGLDDEGSSQGEPQSKSPQESRRLSIQRCIQSLVHACQCRNANCSLPSCQKMKRVVQHTKGCKRKTNGGCPVCKQLIALCCYHAKHCQENKCPVPFCLNIKHKLRQQQIQHRLQQAQLMRRRMATMNTRNVPQQSLPSPTSAPPGTPTQQPSTPQTPQPPAQPQPSPVSMSPAGFPSVARTQPPTTVSTGKPTSQVPAPPPPAQPPPAAVEAARQIEREAQQQQHLYRVNINNSMPPGRTGMGTPGSQMAPVSLNVPRPNQVSGPVMPSMPPGQWQQAPLPQQQPMPGLPRPVISMQAQAAVAGPRMPSVQPPRSISPSALQDLLRTLKSPSSPQQQQQVLNILKSNPQLMAAFIKQRTAKYVANQPGMQPQPGLQSQPGMQPQPGMHQQPSLQNLNAMQAGVPRPGVPPQQQAMGGLNPQGQALNIMNPGHNPNMASMNPQYREMLRRQLLQQQQQQQQQQQQQQQQQQGSAGMAGGMAGHGQFQQPQGPGGYPPAMQQQQRMQQHLPLQGSSMGQMAAQMGQLGQMGQPGLGADSTPNIQQALQQRILQQQQMKQQIGSPGQPNPMSPQQHMLSGQPQASHLPGQQIATSLSNQVRSPAPVQSPRPQSQPPHSSPSPRIQPQPSPHHVSPQTGSPHPGLAVTMASSIDQGHLGNPEQSAMLPQLNTPSRSALSSELSLVGDTTGDTLEKFVEGL

SEQ ID NO: 253 - DNA, 8147 bp, Homo sapiens
tccgaattccttttttttaattgaggaatcaacagccgccatcttgtcgcggacccgaccggggcttcgagcgcgatctactcggccccgccggtcccgggccccacaaccgcccgcgcaccccgctccgcccggccggcccgctccgcccggccctcggcgcccgccccggcggccccgctcgcctctcggctcggcctcccggagcccggcggcggcggcggcggcagcggcggcggcggcggcggaacggggggtgggggggccgcggcggcggcggcgaccccgctcggcgcattgtttttcctcacggcggcggcggcggcgggccgcgggccgggagcggagcccggagccccctcgtcgtcgggccgcgagcgaattcattaagtggggcgcggggggggagcgaggcggcggcggcggcggcaccatgttctcggggactgcctgagccgcccggccgggcgccgtcgctgccagccgggcccgggggggcggccgggccgccggggcgcccccaccgcggagtgtcgcgctcgggaggcgggcaggggatgagggggccgcggccggcggcggcggcggcggccgggggcgggcggtgagcgctgcggggcgctgttgctgtggctgagatttggccgccgcctcccccacccggcctgcgccctccctctccctcggcgcccgcccgcgccgctcgcggcgcccgcgctcgctcctctccctcgcagccggcagggcccccgacccccgtccgggccctcgccggcccggccgcccgtgcccggggctgttttcgcgagcaggtgaaaatggctgagaacttgctggacggaccgcccaaccccaaaagagccaaactcagctcgcccggtttctcggcgaatgacagcacagattttggatcattgtttgacttggaaaatgatcttcctgatgagctgatacccaatggaggagaattaggccttttaaacagtgggaaccttgttccagatgctgcttccaaacataaacaactgtcggagcttctacgaggaggcagcggctctagtatcaacccaggaataggaaatgtgagcgccagcagccccgtgcagcagggcctgggtggccaggctcaagggcagccgaacagtgctaacatggccagcctcagtgccatgggcaagagccctctgagccagggagattcttcagcccccagcctgcctaaacaggcagccagcacctctgggcccacccccgctgcctcccaagcactgaatccgcaagcacaaaagcaagtggggctggcgactagcagccctgccacgtcacagactggacctggtatctgcatgaatgctaactttaaccagacccacccaggcctcctcaatagtaactctggccatagcttaattaatcaggcttcacaagggcaggcgcaagtcatgaatggatctcttggggctgctggcagaggaaggggagctggaatgccgtaccctactccagccatgcagggcgcctcgagcagcgtgctggctgagaccctaacgcaggtttccccgcaaatgactggtcacgcgggactgaacaccgcacaggcaggaggcatggccaagatgggaataactgggaacacaagtccatttggacagccctttagtcaagctggagggcagccaatgggagccactggagtgaacccccagttagccagcaaacagagcatggtcaacagtttgcccaccttccctacagatatcaagaatacttcagtcaccaacgtgccaaatatgtctcagatgcaaacatcagtgggaattgtacccacacaagcaattgcaacaggccccactgcagatcctgaaaaacgcaaactgatacagcagcagctggttctactgcttcatgctcataagtgtcagagacgagagcaagcaaacggagaggttcgggcctgctcgctcccgcattgtcgaaccatgaaaaacgttttgaatcacatgacgcattgtcaggctgggaaagcctgccaagttgcccattgtgcatcttcacgacaaatcatctctcattggaagaactgcacacgacatgactgtcctgtttgcctccctttgaaaaatgccagtgacaagcgaaaccaacaaaccatcctggggtctccagctagtggaattcaaaacacaattggttctgttggcacagggcaacagaatgccacttctttaagtaacccaaatcccatagaccccagctccatgcagcgagcctatgctgctctcggactcccctacatgaaccagccccagacgcagctgcagcctcaggttcctggccagcaaccagcacagcctcaaacccaccagcagatgaggactctcaaccccctgggaaataatccaatgaacattccagcaggaggaataacaacagatcagcagcccccaaacttgatttcagaatcagctcttccgacttccctgggggccacaaacccactgatgaacgatggctccaactctggtaacattggaaccctcagcactataccaacagcagctcctccttctagcaccggtgtaaggaaaggctggcacgaacatgtcactcaggacctgcggagccatctagtgcataaactcgtccaagccatcttcccaacacctgatcccgcagctctaaaggatcgccgcatggaaaacctggtagcctatgctaagaaagtggaaggggacatgtacgagtctgccaacagcagggatgaatattatcacttattagcagagaaaatctacaagatacaaaaagaactagaagaaaaacggaggtcgcgtttacataaacaaggcatcttggggaaccagccagccttaccagccccgggggctcagccccctgtgattccacaggcacaacctgtgagacctccaaatggacccctgtccctgccagtgaatcgcatgcaagtttctcaagggatgaattcatttaaccccatgtccttggggaacgtccagttgccacaagcacccatgggacctcgtgcagcctccccaatgaaccactctgtccagatgaacagcatgggctcagtgccagggatggccatttctccttcccgaatgcctcagcctccgaacatgatgggtgcacacaccaacaacatgatggcccaggcgcccgctcagagccagtttctgccacagaaccagttcccgtcatccagcggggcgatgagtgtgggcatggggcagccgccagcccaaacaggcgtgtcacagggacaggtgcctggtgctgctcttcctaaccctctcaacatgctggggcctcaggccagccagctaccttgccctccagtgacacagtcaccactgcacccaacaccgcctcctgcttccacggctgctggcatgccatctctccagcacacgacaccacctgggatgactcctccccagccagcagctcccactcagccatcaactcctgtgtcgtcttccgggcagactcccaccccgactcctggctcagtgcccagtgctacccaaacccagagcacccctacagtccaggcagcagcccaggcccaggtgaccccgcagcctcaaaccccagttcagcccccgtctgtggctacccctcagtcatcgcagcaacagccgacgcctgtgcacgcccagcctcctggcacaccgctttcccaggcagcagccagcattgataacagagtccctaccccctcctcggtggccagcgcagaaaccaattcccagcagccaggacctgacgtacctgtgctggaaatgaagacggagacccaagcagaggacactgagcccgatcctggtgaatccaaaggggagcccaggtctgagatgatggaggaggatttgcaaggagcttcccaagttaaagaagaaacagacatagcagagcagaaatcagaaccaatggaagtggatgaaaagaaacctgaagtgaaagtagaagttaaagaggaagaagagagtagcagtaacggcacagcctctcagtcaacatctccttcgcagccgcgcaaaaaaatctttaaaccagaggagttacgccaggccctcatgccaaccctagaagcactgtatcgacaggacccagagtcattacctttccggcagcctgtagatccccagctcctcggaattccagactattttgacatcgtaaagaatcccatggacctctccaccatcaagcggaagctggacacagggcaataccaagagccctggcagtacgtggacgacgtctggctcatgttcaacaatgcctggctctataatcgcaagacatcccgagtctataagttttgcagtaagcttgcagaggtctttgagcaggaaattgaccctgtcatgcagtcccttggatattgctgtggacgcaagtatgagttttccccacagactttgtgctgctatgggaagcagctgtgtaccattcctcgcgatgctgcctactacagctatcagaataggtatcatttctgtgagaagtgtttcacagagatccagggcgagaatgtgaccctgggtgacgacccttcacagccccagacgacaatttcaaaggatcagtttgaaaagaagaaaaatgataccttagaccccgaacctttcgttgattgcaaggagtgtggccggaagatgcatcagatttgcgttctgcactatgacatcatttggccttcaggttttgtgtgcgacaactgcttgaagaaaactggcagacctcgaaaagaaaacaaattcagtgctaagaggctgcagaccacaagactgggaaaccacttggaagaccgagtgaacaaatttttgcggcgccagaatcaccctgaagccggggaggtttttgtccgagtggtggccagctcagacaagacggtggaggtcaagcccgggatgaagtcacggtttgtggattctggggaaatgtctgaatctttcccatatcgaaccaaagctctgtttgcttttgaggaaattgacggcgtggatgtctgcttttttggaatgcacgtccaagaatacggctctgattgcccccctccaaacacgaggcgtgtgtacatttcttatctggatagtattcatttcttccggccacgttgcctccgcacagccgtttaccatgagatccttattggatatttagagtatgtgaagaaattagggtatgtgacagggcacatctgggcctgtcctccaagtgaaggagatgattacatcttccattgccacccacctgatcaaaaaatacccaagccaaaacgactgcaggagtggtacaaaaagatgctggacaaggcgtttgcagagcggatcatccatgactacaaggatattttcaaacaagcaactgaagacaggctcaccagtgccaaggaactgccctattttgaaggtgatttctggcccaatgtgttagaagagagcattaaggaactagaacaagaagaagaggagaggaaaaaggaagagagcactgcagccagtgaaaccactgagggcagtcagggcgacagcaagaatgccaagaagaagaacaacaagaaaaccaacaagaacaaaagcagcatcagccgcgccaacaagaagaagcccagcatgcccaacgtgtccaatgacctgtcccagaagctgtatgccaccatggagaagcacaaggaggtcttcttcgtgatccacctgcacgctgggcctgtcatcaacaccctgccccccatcgtcgaccccgaccccctgctcagctgtgacctcatggatgggcgcgacgccttcctcaccctcgccagagacaagcactgggagttctcctccttgcgccgctccaagtggtccacgctctgcatgctggtggagctgcacacccagggccaggaccgctttgtctacacctgcaacgagtgcaagcaccacgtggagacgcgctggcactgcactgtgtgcgaggactacgacctctgcatcaactgctataacacgaagagccatgcccataagatggtgaagtgggggctgggcctggatgacgagggcagcagccagggcgagccacagtcaaagagcccccaggagtcacgccggctgagcatccagcgctgcatccagtcgctggtgcacgcgtgccagtgccgcaacgccaactgctcgctgccatcctgccagaagatgaagcgggtggtgcagcacaccaagggctgcaaacgcaagaccaacgggggctgcccggtgtgcaagcagctcatcgccctctgctgctaccacgccaagcactgccaagaaaacaaatgccccgtgcccttctgcctcaacatcaaacacaagctccgccagcagcagatccagcaccgcctgcagcaggcccagctcatgcgccggcggatggccaccatgaacacccgcaacgtgcctcagcagagtctgccttctcctacctcagcaccgcccgggacccccacacagcagcccagcacaccccagacgccgcagccccctgcccagccccaaccctcacccgtgagcatgtcaccagctggcttccccagcgtggcccggactcagccccccaccacggtgtccacagggaagcctaccagccaggtgccggcccccccacccccggcccagccccctcctgcagcggtggaagcggctcggcagatcgagcgtgaggcccagcagcagcagcacctgtaccgggtgaacatcaacaacagcatgcccccaggacgcacgggcatggggaccccggggagccagatggcccccgtgagcctgaatgtgccccgacccaaccaggtgagcgggcccgtcatgcccagcatgcctcccgggcagtggcagcaggcgccccttccccagcagcagcccatgccaggcttgcccaggcctgtgatatccatgcaggcccaggcggccgtggctgggccccggatgcccagcgtgcagccacccaggagcatctcacccagcgctctgcaagacctgctgcggaccctgaagtcgcccagctcccctcagcagcaacagcaggtgctgaacattctcaaatcaaacccgcagctaatggcagctttcatcaaacagcgcacagccaagtacgtggccaatcagcccggcatgcagccccagcctggcctccagtcccagcccggcatgcaaccccagcctggcatgcaccagcagcccagcctgcagaacctgaatgccatgcaggctggcgtgccgcggcccggtgtgcctccacagcagcaggcgatgggaggcctgaacccccagggccaggccttgaacatcatgaacccaggacacaaccccaacatggcgagtatgaatccacagtaccgagaaatgttacggaggcagctgctgcagcagcagcagcaacagcagcagcaacaacagcagcaacagcagcagcagcaagggagtgccggcatggctgggggcatggcggggcacggccagttccagcagcctcaaggacccggaggctacccaccggccatgcagcagcagcagcgcatgcagcagcatctccccctccagggcagctccatgggccagatggcggctcagatgggacagcttggccagatggggcagccggggctgggggcagacagcacccccaacatccagcaagccctgcagcagcggattctgcagcaacagcagatgaagcagcagattgggtccccaggccagccgaaccccatgagcccccagcaacacatgctctcaggacagccacaggcctcgcatctccctggccagcagatcgccacgtcccttagtaaccaggtgcggtctccagcccctgtccagtctccacggccccagtcccagcctccacattccagcccgtcaccacggatacagccccagccttcgccacaccacgtctcaccccagactggttccccccaccccggactcgcagtcaccatggccagctccatagatcagggacacttggggaaccccgaacagagtgcaatgctcccccagctgaacacccccagcaggagtgcgctgtccagcgaactgtccctggtcggggacaccacgggggacacgctagagaagtttgtggagggcttgtag

SEQ ID NO: 254 - protein, 183 aa, Homo sapiens
MSETPAQCSIKQERISYTPPESPVPSYASSTPLHVPVPRALRMEEDSIRLPAHLRLQPIYWSRDDVAQWLKWAENEFSLRPIDSNTFEMNGKALLLLTKEDFRYRSPHSGDVLYELLQHILKQRKPRILFSPFFHPGNSIHTQPEVILHQNHEEEALQRPVASDFEPQGLSEAARWNSKENLL

SEQ ID NO: 255 - DNA, 549 bp, Homo sapiens
atgtctgagactcctgctcagtgtagcattaagcaggaacgaatttcatatacacctccagagagcccagtgccgagttacgcttcctcgacgccacttcatgttccagtgcctcgagcgctcaggatggaggaagactcgatccgcctgcctgcgcacctgcgcttgcagccaatttactggagcagggatgacgtagcccagtggctcaagtgggctgaaaatgagttttctttaaggccaattgacagcaacacgtttgaaatgaatggcaaagctctcctgctgctgaccaaagaggactttcgctatcgatctcctcattcaggtgatgtgctctatgaactccttcagcatattctgaagcagaggaaacctcggattcttttttcaccattcttccaccctggaaactctatacacacacagccggaggtcatactgcatcagaaccatgaagaagaagcccttcagcggccagtagcatctgactttgagcctcagggtctgagtgaagccgctcgttggaactccaaggaaaaccttctc

SEQ ID NO: 256 - DNA, 763 bp, Homo sapiens; identical to SEQ ID NO: 199

SEQ ID NO: 257 - DNA, 604 bp, Homo sapiens
gaattcagggttttcttttcattttattttcatttgttcatgtgtttgtatttacatacattgtgcctgaatattgtacatgtatgtgacagttgtgtactgtagaatcaaaaactaatgtctgtgaactgaactcttcttgaactttttgttgttgttgttattgttgcttttggagatagggtcttgctctgtcacccaggctggactgcagtggcacaatcacagctcactgcagccttgagctcctggtctcaaacaaccctcccacctcagcctcccaagtagctggggctgcaggcatatgctacctgactaattaaaaatttttttttttttttgtagagacagggtctcactatttttactagtttgcccgggccaagccagtgttgaactactggcctcaagtgatcctcccaccttggcctccccaaagtgcatccctacaggcatgagccactgcactcagcctgaactttcgaaatttattttaagggcccacttttaaatgcttcttttcagcagctaactttccagcggatgcttcatgtggtgccagccatacagatacgcttttagaacttgagctttggagaagctt

SEQ ID NO: 258 - protein, 15 aa, Homo sapiens
RYRSPHSAHDLPANK

SEQ ID NO: 259 - DNA, 45 bp, Homo sapiens
cgctatcgatctcctcattcagcccacgacctccctgcaaacaag

SEQ ID NO: 260 - protein, 15 aa, Homo sapiens
IRLPAHLPHDLPANK

SEQ ID NO: 261 - DNA, 45 bp, Homo sapiens
atccgcctgcctgcgcacctgccccacgacctccctgcaaacaag

SEQ ID NO: 262 - protein, 15 aa, Homo sapiens
QNPNSKEGDVLYELL

SEQ ID NO: 263 - DNA, 45 bp, Homo sapiens
cagaaccccaacagcaaagaaggtgatgtgctctatgaactcctt

SEQ ID NO: 264 - protein, 15 aa, Homo sapiens
QNPNSKEGLQPIYWS

SEQ ID NO: 265 - DNA, 45 bp, Homo sapiens
cagaaccccaacagcaaagaaggcttgcagccaatttactggagc

SEQ ID NO: 266 - protein, 829 aa, Homo sapiens
MNSGVAMKYGNDSSAELSELHSAALASLKGDIVELNKRLQQTERERDLLEKKLAKAQCEQSHLMREHEDVQERTTLRYEERITELHSVIAELNKKIDRLQGTTIREEDEYSELRSELSQSQHEVNEDSRSMDQDQTSVSIPENQSTMVTADMDNCSDLNSELQRVLTGLENVVCGRKKSSCSLSVAEVDRHIEQLTTASEHCDLAIKTVEEIEGVLGRDLYPNLAEERSRWEKELAGLREENESLTAMLCSKEEELNRTKATMNAIREERDRLRRRVRELQTRLQSVQATGPSSPGRLTSTNRPINPSTGELSTSSSSNDIPIAKIAERVKLSKTRSESSSSDRPVLGSEISSIGVSSSVAEHLAHSLQDCSNIQEIFQTLYSHGSAISESKIREFEVETERLNSRIEHLKSQNDLLTITLEECKSNAERMSMLVGKYESNATALRLALQYSEQCIEAYELLLALAESEQSLILGQFRAAGVGSSPGDQSGDENITQMLKRAHDCRKTAENAAKALLMKLDGSCGGAFAVAGCSVQPWESLSSNSHTSTTSSTASSCDTEFTKEDEQRLKDYIQQLKNDRAAVKLTMLELESIHIDPLSYDVKPRGDSQRLDLENAVLMQELMAMKEEMAELKAQLYLLEKEKKALELKLSTREAQEQAYLVHIEHLKSEVEEQKEQRMRSLSSTSSGSKDKPGKECADAASPALSLAELRTTCSENELAAEFTNAIRREKKLKARVQELVSALERLTKSSEIRHQQSAEFVNDLKRANSNLVAAYEKAKKKHQNKLKKLESQMMAMVERHETQVRMLKQRIALLEEENSRPHTNETSL

SEQ ID NO: 267 - DNA, 4181 bp, Homo sapiens
cctcctgcagcaatggctcgtccgtgaaacgcgagccacggctgctctttttaagagtgcctgcatcctccgtttgcgcttcgcaactgtcctgggtgaaaatggctgtctagactaaaatgtggcagaagggaccaagcagtggatattgagcctgtgaagtccaactcttaagctccgagacctgggggactgagagcccagctctgaaaagtgcatcatgaattccggagttgccatgaaatatggaaacgactcctcggccgagctgagtgagctccattcagcagccctggcatcactaaagggagatatagtggaacttaataaacgtctccagcaaacagagagggaacgggaccttctggaaaagaaattggccaaggcacagtgcgagcagtcccacctcatgagagagcatgaggatgtccaggagcgaacgacgcttcgctatgaggaacgcatcacagagctccacagcgtcattgcggagctcaacaagaagatagaccgtctgcaaggcaccaccatcagggaggaagatgagtactcagaactgcgatcagaactcagccagagccaacacgaggtcaacgaggactctcgaagcatggaccaagaccagacctctgtctctatccccgaaaaccagtctaccatggttactgctgacatggacaactgcagtgacctgaactcagaactgcagagggtgctgacagggctggagaatgttgtctgcggcaggaagaagagcagctgcagcctctccgtggccgaggtggacaggcacattgagcagctcaccacagccagcgagcactgtgacctggctattaagacagtcgaggagattgagggggtgcttggccgggacctgtatcccaacctggctgaagagaggtctcggtgggagaaggagctggctgggctgagggaagagaatgagagcctgactgccatgctgtgcagcaaagaggaagaactgaaccggactaaggccaccatgaatgccatccgggaagagcgggaccggctccggaggcgggtcagagagcttcaaactcgactacagagcgtgcaggccacaggtccctccagccctggccgcctcacttccaccaaccgcccgattaaccccagcactggggagctgagcacaagcagcagcagcaatgacattcccatcgccaagattgctgagagggtgaagctatcaaagacaaggtccgaatcgtcatcatctgatcggccagtcctgggctcagaaatcagtagcataggggtatccagcagtgtggctgaacacctggcccactcacttcaggactgctccaatatccaagagattttccaaacactctactcacacggatctgccatctcagaaagcaagattagagagtttgaggtggaaacagaacggctgaatagccggattgagcacctcaaatcccaaaatgacctcctgaccataaccttggaggaatgtaaaagcaatgctgagaggatgagcatgctggtgggaaaatacgaatccaatgccacagcgctgaggctggccttgcagtacagcgagcagtgcatcgaagcctacgaactcctcctggcgctggcagagagtgagcagagcctcatcctggggcagttccgagcggcgggcgtggggtcctcccctggagaccagtcgggggatgaaaacatcactcagatgctcaagcgagctcatgactgccggaagacagctgagaacgctgccaaggccctgctcatgaagctggacggcagctgtgggggagcctttgccgtggccggctgcagcgtgcagccctgggagagcctttcctccaacagccacaccagcacaaccagctccacagccagtagttgcgacaccgagttcactaaagaagacgagcagaggctgaaggattatatccagcagctcaagaatgacagggctgcggtcaagctgaccatgctggagctggaaagcatccacatcgatcctctcagctatgacgtcaagcctcggggagacagccagaggctggatctggaaaacgcagtgcttatgcaggagctcatggccatgaaggaggagatggccgagttgaaggcccagctctacctactggagaaagagaagaaggccctggagctgaagctgagcacgcgggaggcccaggagcaggcctacctggtgcacattgagcacctgaagtccgaggtggaggagcagaaggagcagcggatgcgatccctcagctccaccagcagcggcagcaaagataaacctggcaaggagtgtgctgatgctgcctccccagctctgtccctagctgaactcaggacaacgtgcagcgagaatgagctggctgcggagttcaccaacgccattcgtcgagaaaagaagttgaaggccagagttcaagagctggtgagtgccttggagagactcaccaagagcagtgaaatccgacatcagcaatctgcagagttcgtgaatgatctaaagcgggccaacagcaacctggtggctgcctatgagaaagcaaagaaaaagcatcaaaacaaactgaagaagttagagtcgcagatgatggccatggtggagagacatgagacccaagtgaggatgctcaagcaaagaatagctctgctagaggaggagaactccaggccacacaccaatgaaacttcgctttaatcagcactcacgcaccggagttctgcccatgggaagtaaactgcagcaggccactggggacagaagggcccatgtacttgttgggaggaggaggaaagggaaggctggcaggtaggtcggcacttggacaatggagtgccccaactcaacccttggggtgactggccatggtgacattgtggactgtatccagaggtgcccgctcttccctcctgggcccacaacagcgtgtaaacacatgttctgtgcctgctcagcagagcctcgtttctgctttcagcactcactctccccctcctcttctggtctggcggctgtgcatcagtgggatcccagacatttgtttctgtaagattttccattgtatcctctttttggtagatgctgggctcatcttctagaatctcgtttctcctctttcctcctgcttcatgggaaaacagacctgtgtgtgcctccagcatttaaaaggactgctgatttgtttactacagcaaggctttggtttccaagtcccgggtctcaactttaagatagaggcggccataagaggtgatctctgggagttataggtcatgggaagagcgtagacaggtgttacttacagtcccagatacactaaagttacaaacagaccaccaccaggactgtgcctgaacaattttgtattgagagaataaaaacttccttcaatcttcattttggaggcagggctgggaagggagcgctctcttgattctgggatttctccctctcagtggagccttattaatatccaagacttagagctgggaatctttttgatacctgtagtggaactaaaattctgtcaggggtttcttcaagagctgagaaacattattagcacttcccgccccagggcactacataattgctgttctgctgaatcaaatctcttccacatgggtgcatttgtagctctggacctgtctctacctaaggacaagacactgaggagatactgaacattttgcaaaacttatcacgcctacttaagagtgctgtgtaacccccagttcaagacttagctcctgttgtcatgacggggacagagtgagggaatggtagttaaggcttcttttttgcccccagatacatggtgatggttagcatatggtgcttaaaaggttaaatttcaagcaaaatgcttacagggctaggcagtaccaaagtaactgaattatttcaggaaggtcttcaatcttaaaacaaattcattattctttttcagttttacctcttctctctcagttctacactgatacacttgaaggaccatttactgtttttttctgtagcaccagagaatccatccaaagttccctatgaaaaatgtgttccattgccatagctgactacaaattaaagttgaggaggtttctgcatagagtctttatgtccataagctacgggtaggtctattttcagagcatgatacaaattccacagg

SEQ ID NO: 268 - DNA, 1172 bp, Homo sapiens
gtgagacatgtctgagactcctgctcagtgtagcattaagagtttgtcctctcacttctggagaagatgcagacacaggagatcctgaggatactgcgactgcctgagctaggtgacttgggacagtttttccgcagcctctcggccaccaccctcgacagtggcggggcacggcgatctgtgattgggtctggccctcagctacttacccactactatgatgatgcccggaccatgtaccaggtgttccgccgtgggcttagcatctcagggaatgggccctgtcttggtttcaggaagcctaagcagccttaccagtggctgtcctaccaggaggtggccgacagggctgaatttctggggtccggacttctccagcacaattgtaaagcatgcactgatcagtttattggtgtttttgcacaaaatcggccagagtggatcattgtggagctggcctgctacacatattccatggtggtggtcccgctctatgacaccctgggccctggggctatccgctacatcatcaatacagcggacatcagcaccgtgattgtggacaaacctcagaaggctgtgcttctgctagagcatgtggagaggaaggagactccaggcctcaagctgatcatcctcatggacccattcgaagaagccctgaaagagagagggcagaagtgcggggtggtcattaagtccatgcaggccgtggaggactgtggccaagagaatcaccaggctcctgtgcccccgcagcctgatgacctctccattgtgtgtttcacaagcggcacgacagggaacccaaaaggtgcgatgctcacccatgggaacgtggtggctgatttctcaggctttctgaaagtgacagagagtcagtgggctcccacttgtgcggatgtgcacatttcctatttgcctttagcacacatgtttgagcgaatggtgcagtctgtcgtctattgccacggagggcgtgttggcttcttccagggagatatccgccttctctcagatgacatgagggctctatgccccaccatcttccctgtggtcccacgactgctgaaccggatgtacgacaagatcttcagccaggcaaacacaccattaaagcgctggctcctggagtttgcagcaaagcgtaagcaagccgagaagccgaattc

SEQ ID NO: 269 - protein, 318 aa, Homo sapiens
NHIMVSVSPPEEHAMPIGRIADVQHIKRRDIVLKRELGEGAFGKVFLAECYNLSPTKDKMLVAVKALKDPTLAARKDFQREAELLTNLQHEHIVKFYGVCGDGDPLIMVFEYMKHGDLNKFLRAHGPDAMILVDGQPRQAKGELGLSQMLHIASQIASGMVYLASQHFVHRDLATRNCLVGANLLVKIGDFGMSRDVYSTDYYRVGGHTMLPIRWMPPESIMYRKFTTESDVWSFGVILWEIFTYGKQPWFQLSNTEVIECITQGRVLERPRVCPKEVYDVMLGCWQREPQQRLNIKEIYKILHALGKATPIYLDILG

SEQ ID NO: 270 - DNA, 980 bp, Homo sapiens
aaccacatcatggtctctgtctccccgcctgaagagcacgccatgcccattgggagaatagcagatgtgcagcacattaagaggagagacatcgtgctgaagcgagaactgggtgagggagcctttggaaaggtcttcctggccgagtgctacaacctcagcccgaccaaggacaagatgcttgtggctgtgaaggccctgaaggatcccaccctggctgcccggaaggatttccagagggaggccgagctgctcaccaacctgcagcatgagcacattgtcaagttctatggagtgtgcggcgatggggaccccctcatcatggtctttgaatacatgaagcatggagacctgaataagttcctcagggcccatgggccagatgcaatgatccttgtggatggacagccacgccaggccaagggtgagctggggctctcccaaatgctccacattgccagtcagatcgcctcgggtatggtgtacctggcctcccagcactttgtgcaccgagacctggccaccaggaactgcctggttggagcgaatctgctagtgaagattggggacttcggcatgtccagagatgtctacagcacggattattacagggtgggaggacacaccatgctccccattcgctggatgcctcctgaaagcatcatgtaccggaagttcactacagagagtgatgtatggagcttcggggtgatcctctgggagatcttcacctatggaaagcagccatggttccaactctcaaacacggaggtcattgagtgcattacccaaggtcgtgttttggagcggccccgagtctgccccaaagaggtgtacgatgtcatgctggggtgctggcagagggaaccacagcagcggttgaacatcaaggagatctacaaaatcctccatgctttggggaaggccaccccaatctacctggacattcttggctagtggtggctggtggtcatgaattc

SEQ ID NO: 271 - protein, 408 aa, Homo sapiens
ENNHQESYPLSVSPMENNHCPASSESHPKPSSPRQESTRVIQLMPSPIMHPLILNPRHSVDFKQSRLSEDGLHREGKPINLSHREDLAYMNHIMVSVSPPEEHAMPIGRIADVQHIKRRDIVLKRELGEGAFGKVFLAECYNLSPTKDKMLVAVKALKDPTLAARKDFQREAELLTNLQHEHIVKFYGVCGDGDPLIMVFEYMKHGDLNKFLRAHGPDAMILVDGQPRQAKGELGLSQMLHIASQIASGMVYLASQHFVHRDLATRNCLVGANLLVKIGDFGMSRDVYSTDYYRVGGHTMLPIRWMPPESIMYRKFTTESDVWSFGVILWEIFTYGKQPWFQLSNTEVIECITQGRVLERPRVCPKEVYDVMLGCWQREPQQRLNIKEIYKILHALGKATPIYLDILG

SEQ ID NO: 272 - DNA, 1403 bp, Homo sapiens
gagaacaaccaccaggagtcctaccctctgtcagtgtctcccatggagaataatcactgcccagcgtcctccgagtcccacccgaagccatccagcccccggcaggagagcacacgcgtgatccagctgatgcccagccccatcatgcaccctctgatcctgaacccccggcactccgtggatttcaaacagtccaggctctccgaggacgggctgcatagggaagggaagcccatcaacctctctcatcgggaagacctggcttacatgaaccacatcatggtctctgtctccccgcctgaagagcacgccatgcccattgggagaatagcagatgtgcagcacattaagaggagagacatcgtgctgaagcgagaactgggtgagggagcctttggaaaggtcttcctggccgagtgctacaacctcagcccgaccaaggacaagatgcttgtggctgtgaaggccctgaaggatcccaccctggctgcccggaaggatttccagagggaggccgagctgctcaccaacctgcagcatgagcacattgtcaagttctatggagtgtgcggcgatggggaccccctcatcatggtctttgaatacatgaagcatggagacctgaataagttcctcagggcccatgggccagatgcaatgatccttgtggatggacagccacgccaggccaagggtgagctggggctctcccaaatgctccacattgccagtcagatcgcctcgggtatggtgtacctggcctcccagcactttgtgcaccgagacctggccaccaggaactgcctggttggagcgaatctgctagtgaagattggggacttcggcatgtccagagatgtctacagcacggattattacagggtgggaggacacaccatgctccccattcgctggatgcctcctgaaagcatcatgtaccggaagttcactacagagagtgatgtatggagcttcggggtgatcctctgggagatcttcacctatggaaagcagccatggttccaactctcaaacacggaggtcattgagtgcattacccaaggtcgtgttttggagcggccccgagtctgccccaaagaggtgtacgatgtcatgctggggtgctggcagagggaaccacagcagcggttgaacatcaaggagatctacaaaatcctccatgctttggggaaggccaccccaatctacctggacattcttggctagtggtggctggtggtcatgaattcatactctgttgcctcctctctccctgcctcacatctcccttccacctcacaactccttccatccttgactgaagcgaacatcttcatataaactcaagtgcctgctacacatacaacactgaaaaaaggaaaaaaaaagaaaaaaaaaaaaaa

SEQ ID NO: 273 - protein, 536 aa, Homo sapiens
MGSNKSKPKDASQRRRSLEPAENVHGAGGGAFPASQTPSKPASADGHRGPSAAFAPAAAEPKLFGGFNSSDTVTSPQRAGPLAGGVTTFVALYDYESRTETDLSFKKGERLQIVNNTEGDWWLAHSLSTGQTGYIPSNYVAPSDSIQAEEWYFGKITRRESERLLLNAENPRGTFLVRESETTKGAYCLSVSDFDNAKGLNVKHYKIRKLDSGGFYITSRTQFNSLQQLVAYYSKHADGLCHRLTTVCPTSKPQTQGLAKDAWEIPRESLRLEVKLGQGCFGEVWMGTWNGTTRVAIKTLKPGTMSPEAFLQEAQVMKKLRHEKLVQLYAVVSEEPIYIVTEYMSKGSLLDFLKGETGKYLRLPQLVDMAAQIASGMAYVERMNYVHRDLRAANILVGENLVCKVADFGLARLIEDNEYTARQGAKFPIKWTAPEAALYGRFTIKSDVWSFGILLTELTTKGRVPYPGMVNREVLDQVERGYRMPCPPECPESLHDLMCQCWRKEPEERPTFEYLQAFLEDYFTSTEPQYQPGENL

SEQ ID NO: 274 - DNA, 1611 bp, Homo sapiens
atgggtagcaacaagagcaagcccaaggatgccagccagcggcgccgcagcctggagcccgccgagaacgtgcacggcgctggcgggggcgctttccccgcctcgcagacccccagcaagccagcctcggccgacggccaccgcggccccagcgcggccttcgcccccgcggccgccgagcccaagctgttcggaggcttcaactcctcggacaccgtcacctccccgcagagggcgggcccgctggccggtggagtgaccacctttgtggccctctatgactatgagtctaggacggagacagacctgtccttcaagaaaggcgagcggctccagattgtcaacaacacagagggagactggtggctggcccactcgctcagcacaggacagacaggctacatccccagcaactacgtggcgccctccgactccatccaggctgaggagtggtattttggcaagatcaccagacgggagtcagagcggttactgctcaatgcagagaacccgagagggaccttcctcgtgcgagaaagtgagaccacgaaaggtgcctactgcctctcagtgtctgacttcgacaacgccaagggcctcaacgtgaagcactacaagatccgcaagctggacagcggcggcttctacatcacctcccgcacccagttcaacagcctgcagcagctggtggcctactactccaaacacgccgatggcctgtgccaccgcctcaccaccgtgtgccccacgtccaagccgcagactcagggcctggccaaggatgcctgggagatccctcgggagtcgctgcggctggaggtcaagctgggccagggctgctttggcgaggtgtggatggggacctggaacggtaccaccagggtggccatcaaaaccctgaagcctggcacgatgtctccagaggccttcctgcaggaggcccaggtcatgaagaagctgaggcatgagaagctggtgcagttgtatgctgtggtttcagaggagcccatttacatcgtcacggagtacatgagcaaggggagtttgctggactttctcaagggggagacaggcaagtacctgcggctgcctcagctggtggacatggctgctcagatcgcctcaggcatggcgtacgtggagcggatgaactacgtccaccgggaccttcgtgcagccaacatcctggtgggagagaacctggtgtgcaaagtggccgactttgggctggctcggctcattgaagacaatgagtacacggcgcggcaaggtgccaaattccccatcaagtggacggctccagaagctgccctctatggccgcttcaccatcaagtcggacgtgtggtccttcgggatcctgctgactgagctcaccacaaagggacgggtgccctaccctgggatggtgaaccgcgaggtgctggaccaggtggagcggggctaccggatgccctgcccgccggagtgtcccgagtccctgcacgacctcatgtgccagtgctggcggaaggagcctgaggagcggcccaccttcgagtacctgcaggccttcctggaggactacttcacgtccaccgagccccagtaccagcccggggagaacctctag

SEQ ID NO: 275 - protein, 226 aa, Homo sapiens
MYHASKLSIDEEVYFENLMQLVEHYTSDADGLCTRLIKPKVMEGTVAAQDEFYRSGWALNMKELKLLQTIGKGEFGDVMLGDYRGNKVAVKCIKNDATAQAFLAEASVMTQLRHSNLVQLLGVIVEEKGGLYIVTEYMAKGSLVDYLRSRGRSVLGGDCLLKFSLDVCEAMEYLEGNNFVHRDLAARNVLVSEDNVAKVSDFGLTKEASTPRTRASCQSSGQPLRP

SEQ ID NO: 276 - DNA, 2442 bp, Homo sapiens
tccggggcggcccccggcagccagcgcgacgttccaaaatcgaacctcagtggcggcgctcggaagcggaactctgccggggccgcgccggctacattgtgctgcggtcgactctagaggctccccttcctccccccgactccctccctcccccttcccccgcctttcttccctccgcgacccgggccgtgcgtccgtccccctgcctctgcctggcggtccctcctcccctctccttgcacccatacctctttgtaccgcaccccctgggtatccctgcgcccctcccctcccccctgaccgcatggaccgtcccgcaggccgctgatgccgcccgccggacggtggcccggaccgcagtgccccaagagagctctaatggtaccaagtgacaggttggcttaactgagactcggggacccaagagctcctgagaagatgtcagcaatacaggccgcctggccatccggtacagaatgtattgccaagtacaacttccacggcactgccgagcaggacctgcccttctgcaaaggagacgtgctcaccattgtggccgtcaccaaggaccccaactggtacaaagccaaaaacaaggtgggccgtgagggcatcatcccagccaactacgtccagaagcgggagggcgtgaaggcgggtaccaaactcagcctcatgccgtgagttccacggcaagatcacacgggagcaggctgagcggcttctgtacccgccggagacaggcctgttcctggtgcgggagagcaccaactaccccggagactacacgctgtgcgtgagctgcgacggcaaggtggagcactaccgcatcatgtaccatgccagcaagctcagcatcgacgaggaggtgtactttgagaacctcatgcagctggtggagcactacacctcagacgcagatggactctgtacgcgcctcattaaaccaaaggtcatggagggcacagtggcggcccaggatgagttctaccgcagcggctgggccctgaacatgaaggagctgaagctgctgcagaccatcgggaagggggagttcggagacgtgatgctgggcgattaccgagggaacaaagtcgccgtcaagtgcattaagaacgacgccactgcccaggccttcctggctgaagcctcagtcatgacgcaactgcggcatagcaacctggtgcagctcctgggcgtgatcgtggaggagaagggcgggctctacatcgtcactgagtacatggccaaggggagccttgtggactacctgcggtctaggggtcggtcagtgctgggcggagactgtctcctcaagttctcgctagatgtctgcgaggccatggaatacctggagggcaacaatttcgtgcatcgagacctggctgcccgcaatgtgctggtgtctgaggacaacgtggccaaggtcagcgactttggtctcaccaaggaggcgtccacacccaggacacgggcaagctgccagtcaagtggacagcccctgaggccctgagagagaagaaattctccactaagtctgacgtgtggagtttcggaatccttctctgggaaatctactcctttgggcgagtgccttatccaagaattcccctgaaggacgtcgtccctcgggtggagaagggctacaagatggatgcccccgacggctgcccgcccgcagtctatgaagtcatgaagaactgctggcacctggacgccgccatgcggccctccttcctacagctccgagagcagcttgagcacatcaaaacccacgagctgcacctgtgacggctggcctccgcctgggtcatgggcctgtggggactgaacctggaagatcatggacctggtgcccctgctcactgggcccgagcctgaactgagccccagcgggctggcgggcctttttcctgcgtcccagcctgcacccctccggccccgtctctcttggacccacctgtggggcctggggagcccactgaggggccagggaggaaggaggccacggagcgggaggcagcgccccaccacgtcgggcttccctggcctcccgccactcgccttcttagagttttattcctttccttttttgagattttttttccgtgtgtttattttttattatttttcaagataaggagaaagaaagtacccagcaaatgggcattttacaagaagtacgaatcttatttttcctgtcctgcccgtgagggtgggggggaccgggcccctctctagggacccctcgccccagcctcattccccattctgtgtcccatgtcccgtgtctcctcggtcgccccgtgtttgcgcttgaccatgttgcactgtttgcatgcgcccgaggcagacgtctgtcaggggcttggatttcgtgtgccgctgccacccgcccacccgccttgtgagatggaattgtaataaaccacgccatgagga

SEQ ID NO: 277 - protein, 1114 aa, Homo sapiens
MAKATSGAAGLRLLLLLLLPLLGKVALGLYFSRDAYWEKLYVDQAAGTPLLYVHALRDAPEEVPSFRLGQHLYGTYRTRLHENNWICIQEDTGLLYLNRSLDHSSWEKLSVRNRGFPLLTVYLKVFLSPTSLREGECQWPGCARVYFSFFNTSFPACSSLKPRELCFPETRPSFRIRENRPPGTFHQFRLLPVQFLCPNISVAYRLLEGEGLPFRCAPDSLEVSTRWALDREQREKYELVAVCTVHAGAREEVVMVPFPVTVYDEDDSAPTFPAGVDTASAVVEFKRKEDTVVATLRVFDADVVPASGELVRRYTSTLLPGDTWAQQTFRVEHWPNETSVQANGSFVRATVHDYRLVLNRNLSISENRTMQLAVLVNDSDFQGPGAGVLLLHFNVSVLPVSLHLPSTYSLSVSRRARRFAQIGKVCVENCQAFSGINVQYKLHSSGANCSTLGVVTSAEDTSGILFVNDTKALRRPKCAELHYMVVATDQQTSRQAQAQLLVTVEGSYVAEEAGCPLSCAVSKRRLECEECGGLGSPTGRCEWRQGDGKGITRNFSTCSPSTKTCPDGHCDVVETQDINICPQDCLRGSIVGGHEPGEPRGIKAGYGTCNCFPEEEKCFCEPEDIQDPLCDELCRTVIAAAVLFSFIVSVLLSAFCIHCYHKFAHKPPISSAEMTFRRPAQAFPVSYSSSGARRPSLDSMENQVSVDAFKILEDPKWEFPRKNLVLGKTLGEGEFGKVVKATAFHLKGRAGYTTVAVKMLKENASPSELRDLLSEFNVLKQVNHPHVIKLYGACSQDGPLLLIVEYAKYGSLRGFLRESRKVGPGYLGSGGSRNSSSLDHPDERALTMGDLISFAWQISQGMQYLAEMKLVHRDLAARNILVAEGRKMKISDFGLSRDVYEEDSYVKRSQGRIPVKWMAIESLFDHIYTTQSDVWSFGVLLWEIVTLGGNPYPGIPPERLFNLLKTGHRMERPDNCSEEMYRLMLQCWKQEPDKRPVFADISKDLEKMMVKRRDYLDLAASTPSDSLIYDDGLSEEETPLVDCNNAPLPRALPSTWIENKLYGMSDPNWPGESPVPLTRADGTNTGFPRYPNDSVYANWMLSPSAAKLMDTFDS

SEQ ID NO: 278 - protein, 393 aa, Homo sapiens [sequence omitted]

SEQ ID NO: 279 - DNA, 1303 bp, Homo sapiens
gtccaggagcaggtagctgctgggctccggggacactttgcgttcgggctgggagcgtgctttccacgacggtgacacgcttccctggattggcagccagactgccttccgggtcactgccatggaggagccgcagtcagatcctagcgtcgagccccctctgagtcaggaaacattttcagacctatggaaactacttcctgaaaacaacgttctgtcccccttgccgtcccaagcaatggatgatttgatgctgtccccggacgatattgaacaatggttcactgaagacccaggtccagatgaagctcccagaatgccagaggctgctccccccgtggcccctgcaccagcgactcctacaccggcggcccctgcaccagccccctcctggcccctgtcatcttctgtcccttcccagaaaacctaccagggcagctacggtttccgtctgggcttcttgcattctgggacagccaagtctgtgacttgcacgtactcccctgccctcaacaagatgttttgccaactggccaagacctgccctgtgcagctgtgggttgattccacacccccgcccggcacccgcgtccgcgccatggccatctacaagcagtcacagcacatgacggaggttgtgaggcgctgcccccaccatgagcgctgctcagatagcgatggtctggcccctcctcagcatcttatccgagtggaaggaaatttgcgtgtggagtatttggatgacagaaacacttttcgacatagtgtggtggtgccctatgagccgcctgaggttggctctgactgtaccaccatccactacaactacatgtgtaacagttcctgcatgggcggcatgaaccggaggcccatcctcaccatcatcacactggaagactccagtggtaatctactgggacggaacagctttgaggtgcgtgtttgtgcctgtcctgggagagaccggcgcacagaggaagagaatctccgcaagaaaggggagcctcaccacgagctgcccccagggagcactaagcgagcactgcccaacaacaccagctcctctccccagccaaagaagaaaccactggatggagaatatttcacccttcagatccgtgggcgtgagcgcttcgagatgttccgagagctgaatgaggccttggaactcaaggatgcccaggctgggaaggagccaggggggagcagggctcactccagccacctgaagtccaaaaagggtcagtctacctcccgccataaaaaactcatgttcaagacagaagggcctgactcagactga

SEQ ID NO: 280 - protein, 448 aa, Homo sapiens
MSQSTQTNEFLSPEVFQHIWDFLEQPICSVQPIDLNFVDEPSEDGATNKIEISMDCIRMQDSDLSDPMWPQYTNLGLLNSMDQQIQNGSSSTSPYNTDHAQNSVTAPSPYAQPSSTFDALSPSPAIPSNTDYPGPHSFDVSFQQSSTAKSATWTYSTELKKLYCQIAKTCPIQIKVMTPPPQGAVIRAMPVYKKAEHVTEVVKRCPNHELSREFNEGQIAPPSHLIRVEGNSHAQYVEDPITGRQSVLVPYEPPQVGTEFTTVLYNFMCNSSCVGGMNRRPILIIVTLETRDGQVLGRRCFEARICACPGRDRKADEDSIRKQQVSDSTKNGDGTKRPFRQNTHGIQMTSIKKRRSPDDELLYLPVRGRETYEMLLKIKESLELMQYLPQHTIETYRQQQQQQHQHLLQKHLLSACFRNELVEPRRETPKQSDVFFRHSKPPNRSVYP

SEQ ID NO: 281 - DNA, 2816 bp, Homo sapiens
tcgttgatatcaaagacagttgaaggaaatgaattttgaaacttcacggtgtgccaccctacagtactgccctgacccttacatccagcgtttcgtagaaacccagctcatttctcttggaaagaaagttattaccgatccaccatgtcccagagcacacagacaaatgaattcctcagtccagaggttttccagcatatctgggattttctggaacagcctatatgttcagttcagcccattgacttgaactttgtggatgaaccatcagaagatggtgcgacaaacaagattgagattagcatggactgtatccgcatgcaggactcggacctgagtgaccccatgtggccacagtacacgaacctggggctcctgaacagcatggaccagcagattcagaacggctcctcgtccaccagtccctataacacagaccacgcgcagaacagcgtcacggcgccctcgccctacgcacagcccagctccaccttcgatgctctctctccatcacccgccatcccctccaacaccgactacccaggcccgcacagtttcgacgtgtccttccagcagtcgagcaccgccaagtcggccacctggacgtattccactgaactgaagaaactctactgccaaattgcaaagacatgccccatccagatcaaggtgatgaccccacctcctcagggagctgttatccgcgccatgcctgtctacaaaaaagctgagcacgtcacggaggtggtgaagcggtgccccaaccatgagctgagccgtgaattcaacgagggacagattgcccctcctagtcatttgattcgagtagaggggaacagccatgcccagtatgtagaagatcccatcacaggaagacagagtgtgctggtaccttatgagccaccccaggttggcactgaattcacgacagtcttgtacaatttcatgtgtaacagcagttgtgttggagggatgaaccgccgtccaattttaatcattgttactctggaaaccagagatgggcaagtcctgggccgacgctgctttgaggcccggatctgtgcttgcccaggaagagacaggaaggcggatgaagatagcatcagaaagcagcaagtttcggacagtacaaagaacggtgatggtacgaagcgcccgtttcgtcagaacacacatggtatccagatgacatccatcaagaaacgaagatccccagatgatgaactgttatacttaccagtgaggggccgtgagacttatgaaatgctgttgaagatcaaagagtccctggaactcatgcagtaccttcctcagcacacaattgaaacgtacaggcaacagcaacagcagcagcaccagcacttacttcagaaacatctcctttcagcctgcttcaggaatgagcttgtggagccccggagagaaactccaaaacaatctgacgtcttctttagacattccaagcccccaaaccgatcagtgtacccatagagccctatctctatattttaagtgtgtgtgttgtatttccatgtgtatatgtgagtgtgtgtgtgtgtatgtgtgtgcgtgtgtatctagccctcataaacaggacttgaagacactttggctcagagacccaactgctcaaaggcacaaagccactagtgagagaatcttttgaagggactcaaacctttacaagaaaggatgttttctgcagattttgtatccttagaccggccattggtgggtgaggaaccactgtgtttgtctgtgagctttctgttgtttcctgggagggaggggtcaggtggggaaaggggcattaagatgtttattggaacccttttctgtcttcttctgttgtttttctaaaattcacagggaagcttttgagcaggtctcaaacttaagatgtctttttaagaaaaggagaaaaaagttgttattgtctgtgcataagtaagttgtaggtgactgagagactcagtcagacccttttaatgctggtcatgtaataatattgcaagtagtaagaaacgaaggtgtcaagtgtactgctgggcagcgaggtgatcattaccaaaagtaatcaactttgtgggtggagagttctttgtgagaacttgcattatttgtgtcctcccctcatgtgtaggtagaacatttcttaatgctgtgtacctgcctctgccactgtatgttggcatctgttatgctaaagtttttcttgtacatgaaaccctggaagacctactacaaaaaaactgttgtttggcccccatagcaggtgaactcattttgtgcttttaatagaaagacaaatccaccccagtaatattgcccttacgtagttgtttaccattattcaaagctcaaaatagaatttgaagccctctcacaaaatctgtgattaatttgcttaattagagcttctatccctcaagcctacctaccataaaaccagccatattactgatactgttcagtgcatttagccaggagacttacgttttgagtaagtgagatccaagcagacgtgttaaaatcagcactcctggactggaaattaaagattgaaagggtagactacttttcttttttttactcaaaagtttagagaatctctgtttctttccattttaaaaacatattttaagataatagcataaagactttaaaaatgttcctcccctccatcttcccacacccagtcaccagcactgtattttctgtcaccaagacaatgatttcttgttattgaggctgttgcttttgtggatgtgtgattttaattttcaataaacttttgcatcttggtttaaaagaaa

SEQ ID NO: 282 - protein, 641 aa, Homo sapiens [sequence omitted]

SEQ ID NO: 283 - DNA, 2270 bp, Homo sapiens
tcgttgatatcaaagacagttgaaggaaatgaattttgaaacttcacggtgtgccaccctacagtactgccctgacccttacatccagcgtttcgtagaaacccagctcatttctcttggaaagaaagttattaccgatccaccatgtcccagagcacacagacaaatgaattcctcagtccagaggttttccagcatatctgggattttctggaacagcctatatgttcagttcagcccattgacttgaactttgtggatgaaccatcagaagatggtgcgacaaacaagattgagattagcatggactgtatccgcatgcaggactcggacctgagtgaccccatgtggccacagtacacgaacctggggctcctgaacagcatggaccagcagattcagaacggctcctcgtccaccagtccctataacacagaccacgcgcagaacagcgtcacggcgccctcgccctacgcacagcccagctccaccttcgatgctctctctccatcacccgccatcccctccaacaccgactacccaggcccgcacagtttcgacgtgtccttccagcagtcgagcaccgccaagtcggccacctggacgtattccactgaactgaagaaactctactgccaaattgcaaagacatgccccatccagatcaaggtgatgaccccacctcctcagggagctgttatccgcgccatgcctgtctacaaaaaagctgagcacgtcacggaggtggtgaagcggtgccccaaccatgagctgagccgtgaattcaacgagggacagattgcccctcctagtcatttgattcgagtagaggggaacagccatgcccagtatgtagaagatcccatcacaggaagacagagtgtgctggtaccttatgagccaccccaggttggcactgaattcacgacagtcttgtacaatttcatgtgtaacagcagttgtgttggagggatgaaccgccgtccaattttaatcattgttactctggaaaccagagatgggcaagtcctgggccgacgctgctttgaggcccggatctgtgcttgcccaggaagagacaggaaggcggatgaagatagcatcagaaagcagcaagtttcggacagtacaaagaacggtgatggtacgaagcgcccgtttcgtcagaacacacatggtatccagatgacatccatcaagaaacgaagatccccagatgatgaactgttatacttaccagtgaggggccgtgagacttatgaaatgctgttgaagatcaaagagtccctggaactcatgcagtaccttcctcagcacacaattgaaacgtacaggcaacagcaacagcagcagcaccagcacttacttcagaaacagacctcaatacagtctccatcttcatatggtaacagctccccacctctgaacaaaatgaacagcatgaacaagctgccttctgtgagccagcttatcaaccctcagcagcgcaacgccctcactcctacaaccattcctgatggcatgggagccaacattcccatgatgggcacccacatgccaatggctggagacatgaatggactcagccccacccaggcactccctcccccactctccatgccatccacctcccactgcacacccccacctccgtatccaacagattgcagcattgtcggtttcttagcgaggttgggctgttcatcatgtctggactatttcacgacccaggggctgaccaccatctatcagattgagcattactccatggatgatctggcaagtctgaaaatccctgagcaatttcgacatgcgatctggaagggcatcctggaccaccggcagctccacgaattctcctccccttctcatctcctgcggaccccaagcagtgcctctacagtcagtgtgggctccagtgagacccggggtgagcgtgttattgatgctgtgcgattcaccctccgccagaccatctctttcccaccccgagatgagtggaatgacttcaactttgacatggatgctcgccgcaataagcaacagcgcatcaaagaggagggggagtgagcctcaccatgtgagctcttcctatccctctcctaactgccagccccctaaaagcactcctgcttaatcttcaaagccttctccctagctcctccccttcctcttgtctgatttcttaggggaaggagaagtaagaggctacctcttacctaacatctgacctggcatctaattctgattctggctttaagccttcaaaa

SEQ ID NO: 284 - protein, 471 aa, Homo sapiens
MSQSTQTNEFLSPEVFQHIWDFLEQPICSVQPIDLNFVDEPSEDGATNKIEISMDCIRMQDSDLSDPMWPQYTNLGLLNSMDQQIQNGSSSTSPYNTDHAQNSVTAPSPYAQPSSTFDALSPSPAIPSNTDYPGPHSFDVSFQQSSTAKSATWTYSTELKKLYCQIAKTCPIQIKVMTPPPQGAVIRAMPVYKKAEHVTEVVKRCPNHELSREFNEGQIAPPSHLIRVEGNSHAQYVEDPITGRQSVLVPYEPPQVGTEFTTVLYNFMCNSSCVGGMNRRPILIIVTLETRDGQVLGRRCFEARICACPGRDRKADEDSIRKQQVSDSTKNGDGTKRPFRQNTHGIQMTSIKKRRSPDDELLYLPVRGRETYEMLLKIKESLELMQYLPQHTIETYRQQQQQQHQHLLQKQTSIQSPSSYGNSSPPLNKMNSMNKLPSVSQLINPQQRNALTPTTIPDGMGANRSGKSENP

SEQ ID NO: 285 - DNA, 2031 bp, Homo sapiens
tcgttgatatcaaagacagttgaaggaaatgaattttgaaacttcacggtgtgccaccctacagtactgccctgacccttacatccagcgtttcgtagaaacccagctcatttctcttggaaagaaagttattaccgatccaccatgtcccagagcacacagacaaatgaattcctcagtccagaggttttccagcatatctgggattttctggaacagcctatatgttcagttcagcccattgacttgaactttgtggatgaaccatcagaagatggtgcgacaaacaagattgagattagcatggactgtatccgcatgcaggactcggacctgagtgaccccatgtggccacagtacacgaacctggggctcctgaacagcatggaccagcagattcagaacggctcctcgtccaccagtccctataacacagaccacgcgcagaacagcgtcacggcgccctcgccctacgcacagcccagctccaccttcgatgctctctctccatcacccgccatcccctccaacaccgactacccaggcccgcacagtttcgacgtgtccttccagcagtcgagcaccgccaagtcggccacctggacgtattccactgaactgaagaaactctactgccaaattgcaaagacatgccccatccagatcaaggtgatgaccccacctcctcagggagctgttatccgcgccatgcctgtctacaaaaaagctgagcacgtcacggaggtggtgaagcggtgccccaaccatgagctgagccgtgaattcaacgagggacagattgcccctcctagtcatttgattcgagtagaggggaacagccatgcccagtatgtagaagatcccatcacaggaagacagagtgtgctggtaccttatgagccaccccaggttggcactgaattcacgacagtcttgtacaatttcatgtgtaacagcagttgtgttggagggatgaaccgccgtccaattttaatcattgttactctggaaaccagagatgggcaagtcctgggccgacgctgctttgaggcccggatctgtgcttgcccaggaagagacaggaaggcggatgaagatagcatcagaaagcagcaagtttcggacagtacaaagaacggtgatggtacgaagcgcccgtttcgtcagaacacacatggtatccagatgacatccatcaagaaacgaagatccccagatgatgaactgttatacttaccagtgaggggccgtgagacttatgaaatgctgttgaagatcaaagagtccctggaactcatgcagtaccttcctcagcacacaattgaaacgtacaggcaacagcaacagcagcagcaccagcacttacttcagaaacagacctcaatacagtctccatcttcatatggtaacagctccccacctctgaacaaaatgaacagcatgaacaagctgccttctgtgagccagcttatcaaccctcagcagcgcaacgccctcactcctacaaccattcctgatggcatgggagccaacagatctggcaagtctgaaaatccctgagcaatttcgacatgcgatctggaagggcatcctggaccaccggcagctccacgaattctcctccccttctcatctcctgcggaccccaagcagtgcctctacagtcagtgtgggctccagtgagacccggggtgagcgtgttattgatgctgtgcgattcaccctccgccagaccatctctttcccaccccgagatgagtggaatgacttcaactttgacatggatgctcgccgcaataagcaacagcgcatcaaagaggagggggagtgagcctcaccatgtgagctcttcctatccctctcctaactgccagccccctaaaagcactcctgcttaatcttcaaagccttctccctagctcctccccttcctcttgtctgatttcttaggggaaggagaagtaagaggctacctcttacctaacatctgacctggcatctaattctgattctggctttaagccttcaaaa

SEQ ID NO: 286 - protein, 416 aa, Homo sapiens
MLYLENNAQTQFSEPQYTNLGLLNSMDQQIQNGSSSTSPYNTDHAQNSVTAPSPYAQPSSTFDALSPSPAIPSNTDYPGPHSFDVSFQQSSTAKSATWTYSTELKKLYCQIAKTCPIQIKVMTPPPQGAVIRAMPVYKKAEHVTEVVKRCPNHELSREFNEGQIAPPSHLIRVEGNSHAQYVEDPITGRQSVLVPYEPPQVGTEFTTVLYNFMCNSSCVGGMNRRPILIIVTLETRDGQVLGRRCFEARICACPGRDRKADEDSIRKQQVSDSTKNGDGTKRPFRQNTHGIQMTSIKKRRSPDDELLYLPVRGRETYEMLLKIKESLELMQYLPQHTIETYRQQQQQQHQHLLQKQTSIQSPSSYGNSSPPLNKMNSMNKLPSVSQLINPQQRNALTPTTIPDGMGANRSGKSENP

SEQ ID NO: 287 - skipped

SEQ ID NO: 288 - protein, 461 aa, Homo sapiens [sequence omitted]

SEQ ID NO: 289 - skipped

SEQ ID NO: 290 - protein, 586 aa, Homo sapiens [sequence omitted]

SEQ ID NO: 291 - skipped

SEQ ID NO: 292 - protein, 393 aa, Homo sapiens
MLYLENNAQTQFSEPQYTNLGLLNSMDQQIQNGSSSTSPYNTDHAQNSVTAPSPYAQPSSTFDALSPSPAIPSNTDYPGPHSFDVSFQQSSTAKSATWTYSTELKKLYCQIAKTCPIQIKVMTPPPQGAVIRAMPVYKKAEHVTEVVKRCPNHELSREFNEGQIAPPSHLIRVEGNSHAQYVEDPITGRQSVLVPYEPPQVGTEFTTVLYNFMCNSSCVGGMNRRPILIIVTLETRDGQVLGRRCFEARICACPGRDRKADEDSIRKQQVSDSTKNGDGTKRPFRQNTHGIQMTSIKKRRSPDDELLYLPVRGRETYEMLLKIKESLELMQYLPQHTIETYRQQQQQQHQHLLQKHLLSACFRNELVEPRRETPKQSDVFFRHSKPPNRSVYP

SEQ ID NO: 293 - skipped

SEQ ID NO: 294 - protein, 471 aa, Homo sapiens; identical to SEQ ID NO: 284

SEQ ID NO: 295 - skipped

SEQ ID NO: 296 - protein, 516 aa, Homo sapiens [sequence omitted]

SEQ ID NO: 297 - skipped

SEQ ID NO: 298 - protein, 641 aa, Homo sapiens [sequence omitted]

SEQ ID NO: 299 - skipped

SEQ ID NO: 300 - protein, 448 aa, Homo sapiens; identical to SEQ ID NO: 280

SEQ ID NO: 301 - skipped

SEQ ID NO: 302 - protein, 461 aa, Homo sapiens
MLYLENNAQTQFSEPQYTNLGLLNSMDQQIQNGSSSTSPYNTDHAQNSVTAPSPYAQPSSTFDALSPSPAIPSNTDYPGPHSFDVSFQQSSTAKSATWTYSTELKKLYCQIAKTCPIQIKVMTPPPQGAVIRAMPVYKKAEHVTEVVKRCPNHELSREFNEGQIAPPSHLIRVEGNSHAQYVEDPITGRQSVLVPYEPPQVGTEFTTVLYNFMCNSSCVGGMNRRPILIIVTLETRDGQVLGRRCFEARICACPGRDRKADEDSIRKQQVSDSTKNGDGTKRPFRQNTHGIQMTSIKKRRSPDDELLYLPVRGRETYEMLLKIKESLELMQYLPQHTIETYRQQQQQQHQHLLQKQTSIQSPSSYGNSSPPLNKMNSMNKLPSVSQLINPQQRNALTPTTIPDGMGANIPMMGTHMPMAGDMNGLSPTQALPPPLSMPSTSHCTPPPPYPTDCSIVRIWQV

SEQ ID NO: 303 - DNA, 1386 bp, Homo sapiens
atgttgtacctggaaaacaatgcccagactcaatttagtgagccacagtacacgaacctggggctcctgaacagcatggaccagcagattcagaacggctcctcgtccaccagtccctataacacagaccacgcgcagaacagcgtcacggcgccctcgccctacgcacagcccagctccaccttcgatgctctctctccatcacccgccatcccctccaacaccgactacccaggcccgcacagtttcgacgtgtccttccagcagtcgagcaccgccaagtcggccacctggacgtattccactgaactgaagaaactctactgccaaattgcaaagacatgccccatccagatcaaggtgatgaccccacctcctcagggagctgttatccgcgccatgcctgtctacaaaaaagctgagcacgtcacggaggtggtgaagcggtgccccaaccatgagctgagccgtgaattcaacgagggacagattgcccctcctagtcatttgattcgagtagaggggaacagccatgcccagtatgtagaagatcccatcacaggaagacagagtgtgctggtaccttatgagccaccccaggttggcactgaattcacgacagtcttgtacaatttcatgtgtaacagcagttgtgttggagggatgaaccgccgtccaattttaatcattgttactctggaaaccagagatgggcaagtcctgggccgacgctgctttgaggcccggatctgtgcttgcccaggaagagacaggaaggcggatgaagatagcatcagaaagcagcaagtttcggacagtacaaagaacggtgatggtacgaagcgcccgtttcgtcagaacacacatggtatccagatgacatccatcaagaaacgaagatccccagatgatgaactgttatacttaccagtgaggggccgtgagacttatgaaatgctgttgaagatcaaagagtccctggaactcatgcagtaccttcctcagcacacaattgaaacgtacaggcaacagcaacagcagcagcaccagcacttacttcagaaacagacctcaatacagtctccatcttcatatggtaacagctccccacctctgaacaaaatgaacagcatgaacaagctgccttctgtgagccagcttatcaaccctcagcagcgcaacgccctcactcctacaaccattcctgatggcatgggagccaacattcccatgatgggcacccacatgccaatggctggagacatgaatggactcagccccacccaggcactccctcccccactctccatgccatccacctcccactgcacacccccacctccgtatcccacagattgcagcattgtcaggatctggcaagtctga

SEQ ID NO: 304 - protein, 393 aa, Homo sapiens; identical to SEQ ID NO: 292

SEQ ID NO: 305 - DNA, 1182 bp, Homo sapiens
atgttgtacctggaaaacaatgcccagactcaatttagtgagccacagtacacgaacctggggctcctgaacagcatggaccagcagattcagaacggctcctcgtccaccagtccctataacacagaccacgcgcagaacagcgtcacggcgccctcgccctacgcacagcccagctccaccttcgatgctctctctccatcacccgccatcccctccaacaccgactacccaggcccgcacagtttcgacgtgtccttccagcagtcgagcaccgccaagtcggccacctggacgtattccactgaactgaagaaactctactgccaaattgcaaagacatgccccatccagatcaaggtgatgaccccacctcctcagggagctgttatccgcgccatgcctgtctacaaaaaagctgagcacgtcacggaggtggtgaagcggtgccccaaccatgagctgagccgtgaattcaacgagggacagattgcccctcctagtcatttgattcgagtagaggggaacagccatgcccagtatgtagaagatcccatcacaggaagacagagtgtgctggtaccttatgagccaccccaggttggcactgaattcacgacagtcttgtacaatttcatgtgtaacagcagttgtgttggagggatgaaccgccgtccaattttaatcattgttactctggaaaccagagatgggcaagtcctgggccgacgctgctttgaggcccggatctgtgcttgcccaggaagagacaggaaggcggatgaagatagcatcagaaagcagcaagtttcggacagtacaaagaacggtgatggtacgaagcgcccgtttcgtcagaacacacatggtatccagatgacatccatcaagaaacgaagatccccagatgatgaactgttatacttaccagtgaggggccgtgagacttatgaaatgctgttgaagatcaaagagtccctggaactcatgcagtaccttcctcagcacacaattgaaacgtacaggcaacagcaacagcagcagcaccagcacttacttcagaaacatctcctttcagcctgcttcaggaatgagcttgtggagccccggagagaaactccaaaacaatctgacgtcttctttagacattccaagcccccaaaccgatcagtgtacccatag

SEQ ID NO: 306 - protein, 586 aa, Homo sapiens
MLYLENNAQTQFSEPQYTNLGLLNSMDQQIQNGSSSTSPYNTDHAQNSVTAPSPYAQPSSTFDALSPSPAIPSNTDYPGPHSFDVSFQQSSTAKSATWTYSTELKKLYCQIAKTCPIQIKVMTPPPQGAVIRAMPVYKKAEHVTEVVKRCPNHELSREFNEGQIAPPSHLIRVEGNSHAQYVEDPITGRQSVLVPYEPPQVGTEFTTVLYNFMCNSSCVGGMNRRPILIIVTLETRDGQVLGRRCFEARICACPGRDRKADEDSIRKQQVSDSTKNGDGTKRPFRQNTHGIQMTSIKKRRSPDDELLYLPVRGRETYEMLLKIKESLELMQYLPQHTIETYRQQQQQQHQHLLQKQTSIQSPSSYGNSSPPLNKMNSMNKLPSVSQLINPQQRNALTPTTIPDGMGANIPMMGTHMPMAGDMNGLSPTQALPPPLSMPSTSHCTPPPPYPTDCSIVSFLARLGCSSCLDYFTTQGLTTIYQIEHYSMDDLASLKIPEQFRHAIWKGILDHRQLHEFSSPSHLLRTPSSASTVSVGSSETRGERVIDAVRFTLRQTISFPPRDEWNDFNFDMDARRNKQQRIKEEGE

SEQ ID NO: 307 - DNA, 1761 bp, Homo sapiens
atgttgtacctggaaaacaatgcccagactcaatttagtgagccacagtacacgaacctggggctcctgaacagcatggaccagcagattcagaacggctcctcgtccaccagtccctataacacagaccacgcgcagaacagcgtcacggcgccctcgccctacgcacagcccagctccaccttcgatgctctctctccatcacccgccatcccctccaacaccgactacccaggcccgcacagtttcgacgtgtccttccagcagtcgagcaccgccaagtcggccacctggacgtattccactgaactgaagaaactctactgccaaattgcaaagacatgccccatccagatcaaggtgatgaccccacctcctcagggagctgttatccgcgccatgcctgtctacaaaaaagctgagcacgtcacggaggtggtgaagcggtgccccaaccatgagctgagccgtgaattcaacgagggacagattgcccctcctagtcatttgattcgagtagaggggaacagccatgcccagtatgtagaagatcccatcacaggaagacagagtgtgctggtaccttatgagccaccccaggttggcactgaattcacgacagtcttgtacaatttcatgtgtaacagcagttgtgttggagggatgaaccgccgtccaattttaatcattgttactctggaaaccagagatgggcaagtcctgggccgacgctgctttgaggcccggatctgtgcttgcccaggaagagacaggaaggcggatgaagatagcatcagaaagcagcaagtttcggacagtacaaagaacggtgatggtacgaagcgcccgtttcgtcagaacacacatggtatccagatgacatccatcaagaaacgaagatccccagatgatgaactgttatacttaccagtgaggggccgtgagacttatgaaatgctgttgaagatcaaagagtccctggaactcatgcagtaccttcctcagcacacaattgaaacgtacaggcaacagcaacagcagcagcaccagcacttacttcagaaacagacctcaatacagtctccatcttcatatggtaacagctccccacctctgaacaaaatgaacagcatgaacaagctgccttctgtgagccagcttatcaaccctcagcagcgcaacgccctcactcctacaaccattcctgatggcatgggagccaacattcccatgatgggcacccacatgccaatggctggagacatgaatggactcagccccacccaggcactccctcccccactctccatgccatccacctcccactgcacacccccacctccgtatcccacagattgcagcattgtcagtttcttagcgaggttgggctgttcatcatgtctggactatttcacgacccaggggctgaccaccatctatcagattgagcattactccatggatgatctggcaagtctgaaaatccctgagcaatttcgacatgcgatctggaagggcatcctggaccaccggcagctccacgaattctcctccccttctcatctcctgcggaccccaagcagtgcctctacagtcagtgtgggctccagtgagacccggggtgagcgtgttattgatgctgtgcgattcaccctccgccagaccatctctttcccaccccgagatgagtggaatgacttcaactttgacatggatgctcgccgcaataagcaacagcgcatcaaagaggagggggagtga

SEQ ID NO: 308 - protein, 516 aa, Homo sapiens
MSQSTQTNEFLSPEVFQHIWDFLEQPICSVQPIDLNFVDEPSEDGATNKIEISMDCIRMQDSDLSDPMWPQYTNLGLLNSMDQQIQNGSSSTSPYNTDHAQNSVTAPSPYAQPSSTFDALSPSPAIPSNTDYPGPHSFDVSFQQSSTAKSATWTYSTELKKLYCQIAKTCPIQIKVMTPPPQGAVIRAMPVYKKAEHVTEVVKRCPNHELSREFNEGQIAPPSHLIRVEGNSHAQYVEDPITGRQSVLVPYEPPQVGTEFTTVLYNFMCNSSCVGGMNRRPILIIVTLETRDGQVLGRRCFEARICACPGRDRKADEDSIRKQQVSDSTKNGDGTKRPFRQNTHGIQMTSIKKRRSPDDELLYLPVRGRETYEMLLKIKESLELMQYLPQHTIETYRQQQQQQHQHLLQKQTSIQSPSSYGNSSPPLNKMNSMNKLPSVSQLINPQQRNALTPTTIPDGMGANIPMMGTHMPMAGDMNGLSPTQALPPPLSMPSTSHCTPPPPYPTDCSIVRIWQV

SEQ ID NO: 309 - DNA, 1551 bp, Homo sapiens
atgtcccagagcacacagacaaatgaattcctcagtccagaggttttccagcatatctgggattttctggaacagcctatatgttcagttcagcccattgacttgaactttgtggatgaaccatcagaagatggtgcgacaaacaagattgagattagcatggactgtatccgcatgcaggactcggacctgagtgaccccatgtggccacagtacacgaacctggggctcctgaacagcatggaccagcagattcagaacggctcctcgtccaccagtccctataacacagaccacgcgcagaacagcgtcacggcgccctcgccctacgcacagcccagctccaccttcgatgctctctctccatcacccgccatcccctccaacaccgactacccaggcccgcacagtttcgacgtgtccttccagcagtcgagcaccgccaagtcggccacctggacgtattccactgaactgaagaaactctactgccaaattgcaaagacatgccccatccagatcaaggtgatgaccccacctcctcagggagctgttatccgcgccatgcctgtctacaaaaaagctgagcacgtcacggaggtggtgaagcggtgccccaaccatgagctgagccgtgaattcaacgagggacagattgcccctcctagtcatttgattcgagtagaggggaacagccatgcccagtatgtagaagatcccatcacaggaagacagagtgtgctggtaccttatgagccaccccaggttggcactgaattcacgacagtcttgtacaatttcatgtgtaacagcagttgtgttggagggatgaaccgccgtccaattttaatcattgttactctggaaaccagagatgggcaagtcctgggccgacgctgctttgaggcccggatctgtgcttgcccaggaagagacaggaaggcggatgaagatagcatcagaaagcagcaagtttcggacagtacaaagaacggtgatggtacgaagcgcccgtttcgtcagaacacacatggtatccagatgacatccatcaagaaacgaagatccccagatgatgaactgttatacttaccagtgaggggccgtgagacttatgaaatgctgttgaagatcaaagagtccctggaactcatgcagtaccttcctcagcacacaattgaaacgtacaggcaacagcaacagcagcagcaccagcacttacttcagaaacagacctcaatacagtctccatcttcatatggtaacagctccccacctctgaacaaaatgaacagcatgaacaagctgccttctgtgagccagcttatcaaccctcagcagcgcaacgccctcactcctacaaccattcctgatggcatgggagccaacattcccatgatgggcacccacatgccaatggctggagacatgaatggactcagccccacccaggcactccctcccccactctccatgccatccacctcccactgcacacccccacctccgtatcccacagattgcagcattgtcaggatctggcaagtctga

SEQ ID NO: 310 - protein, 641 aa, Homo sapiens
MSQSTQTNEFLSPEVFQHIWDFLEQPICSVQPIDLNFVDEPSEDGATNKIEISMDCIRMQDSDLSDPMWPQYTNLGLLNSMDQQIQNGSSSTSPYNTDHAQNSVTAPSPYAQPSSTFDALSPSPAIPSNTDYPGPHSFDVSFQQSSTAKSATWTYSTELKKLYCQIAKTCPIQIKVMTPPPQGAVIRAMPVYKKAEHVTEVVKRCPNHELSREFNEGQIAPPSHLIRVEGNSHAQYVEDPITGRQSVLVPYEPPQVGTEFTTVLYNFMCNSSCVGGMNRRPILIIVTLETRDGQVLGRRCFEARICACPGRDRKADEDSIRKQQVSDSTKNGDGTKRPFRQNTHGIQMTSIKKRRSPDDELLYLPVRGRETYEMLLKIKESLELMQYLPQHTIETYRQQQQQQHQHLLQKQTSIQSPSSYGNSSPPLNKMNSMNKLPSVSQLINPQQRNALTPTTIPDGMGANIPMMGTHMPMAGDMNGLSPTQALPPPLSMPSTSHCTPPPPYPTDCSIVSFLARLGCSSCLDYFTTQGLTTIYQIEHYSMDDLASLKIPEQFRHAIWKGILDHRQLHEFSSPSHLLRTPSSASTVSVGSSETRGERVIDAVRFTLRQTISFPPRDEWNDFNFDMDARRNKQQRIKEEGE

SEQ ID NO: 311 - DNA, 1926 bp, Homo sapiens
atgtcccagagcacacagacaaatgaattcctcagtccagaggttttccagcatatctgggattttctggaacagcctatatgttcagttcagcccattgacttgaactttgtggatgaaccatcagaagatggtgcgacaaacaagattgagattagcatggactgtatccgcatgcaggactcggacctgagtgaccccatgtggccacagtacacgaacctggggctcctgaacagcatggaccagcagattcagaacggctcctcgtccaccagtccctataacacagaccacgcgcagaacagcgtcacggcgccctcgccctacgcacagcccagctccaccttcgatgctctctctccatcacccgccatcccctccaacaccgactacccaggcccgcacagtttcgacgtgtccttccagcagtcgagcaccgccaagtcggccacctggacgtattccactgaactgaagaaactctactgccaaattgcaaagacatgccccatccagatcaaggtgatgaccccacctcctcagggagctgttatccgcgccatgcctgtctacaaaaaagctgagcacgtcacggaggtggtgaagcggtgccccaaccatgagctgagccgtgaattcaacgagggacagattgcccctcctagtcatttgattcgagtagaggggaacagccatgcccagtatgtagaagatcccatcacaggaagacagagtgtgctggtaccttatgagccaccccaggttggcactgaattcacgacagtcttgtacaatttcatgtgtaacagcagttgtgttggagggatgaaccgccgtccaattttaatcattgttactctggaaaccagagatgggcaagtcctgggccgacgctgctttgaggcccggatctgtgcttgcccaggaagagacaggaaggcggatgaagatagcatcagaaagcagcaagtttcggacagtacaaagaacggtgatggtacgaagcgcccgtttcgtcagaacacacatggtatccagatgacatccatcaagaaacgaagatccccagatgatgaactgttatacttaccagtgaggggccgtgagacttatgaaatgctgttgaagatcaaagagtccctggaactcatgcagtaccttcctcagcacacaattgaaacgtacaggcaacagcaacagcagcagcaccagcacttacttcagaaacagacctcaatacagtctccatcttcatatggtaacagctccccacctctgaacaaaatgaacagcatgaacaagctgccttctgtgagccagcttatcaaccctcagcagcgcaacgccctcactcctacaaccattcctgatggcatgggagccaacattcccatgatgggcacccacatgccaatggctggagacatgaatggactcagccccacccaggcactccctcccccactctccatgccatccacctcccactgcacacccccacctccgtatcccacagattgcagcattgtcagtttcttagcgaggttgggctgttcatcatgtctggactatttcacgacccaggggctgaccaccatctatcagattgagcattactccatggatgatctggcaagtctgaaaatccctgagcaatttcgacatgcgatctggaagggcatcctggaccaccggcagctccacgaattctcctccccttctcatctcctgcggaccccaagcagtgcctctacagtcagtgtgggctccagtgagacccggggtgagcgtgttattgatgctgtgcgattcaccctccgccagaccatctctttcccaccccgagatgagtggaatgacttcaactttgacatggatgctcgccgcaataagcaacagcgcatcaaagaggagggggagtga

SEQ ID NO: 312 - protein, 448 aa, Homo sapiens; identical to SEQ ID NO: 280

SEQ ID NO: 313 - DNA, 2816 bp, Homo sapiens; identical to SEQ ID NO: 281

SEQ ID NO: 314 - protein, 499 aa, Homo sapiens
MAQSTATSPDGGTTFEHLWSSLEPDSTYFDLPQSSRGNNEVVGGTDSSMDVFHLEGMTTSVMAQFNLLSSTMDQMSSRAASASPYTPEHAASVPTHSPYAQPSSTFDTMSPAPVIPSNTDYPGPHHFEVTFQQSSTAKSATWTYSPLLKKLYCQIAKTCPIQIKVSTPPPPGTAIRAMPVYKKAEHVTDVVKRCPNHELGRDFNEGQSAPASHLIRVEGNNLSQYVDDPVTGRQSVVVPYEPPQVGTEFTTILYNFMCNSSCVGGMNRRPILIIITLEMRDGQVLGRRSFEGRICACPGRDRKADEDHYREQQALNESSAKNGAASKRAFKQSPPAVPALGAGVKKRRHGDEDTYYLQVRGRENFEILMKLKESLELMELVPQPLVDSYRQQQQLLQRPSHLQPPSYGPVLSPMNKVHGGMNKLPSVNQLVGQPPPHSSAATPNLGPVGPGMLNNHGHAVPANGEMSSSHSAQSMVSGSHCTPPPPYHADPSLVRTWGP

SEQ ID NO: 315 - protein, 636 aa, Homo sapiens
MAQSTATSPDGGTTFEHLWSSLEPDSTYFDLPQSSRGNNEVVGGTDSSMDVFHLEGMTTSVMAQFNLLSSTMDQMSSRAASASPYTPEHAASVPTHSPYAQPSSTFDTMSPAPVIPSNTDYPGPHHFEVTFQQSSTAKSATWTYSPLLKKLYCQIAKTCPIQIKVSTPPPPGTAIRAMPVYKKAEHVTDVVKRCPNHELGRDFNEGQSAPASHLIRVEGNNLSQYVDDPVTGRQSVVVPYEPPQVGTEFTTILYNFMCNSSCVGGMNRRPILIIITLEMRDGQVLGRRSFEGRICACPGRDRKADEDHYREQQALNESSAKNGAASKRAFKQSPPAVPALGAGVKKRRHGDEDTYYLQVRGRENFEILMKLKESLELMELVPQPLVDSYRQQQQLLQRPSHLQPPSYGPVLSPMNKVHGGMNKLPSVNQLVGQPPPHSSAATPNLGPVGPGMLNNHGHAVPANGEMSSSHSAQSMVSGSHCTPPPPYHADPSLVSFLTGLGCPNCIEYFTSQGLQSIYHLQNLTIEDLGALKIPEQYRMTIWRGLQDLKQGHDYSTAQQLLRSSNAATISIGGSGELQRQRVMEAVHFRVRHTITIPNRGGPGGGPDEWADFGFDLPDCKARKQPIKEEFTEAEIH

SEQ ID NO: 316 - protein, 588 aa, Homo sapiens
MDVFHLEGMTTSVMAQFNLLSSTMDQMSSRAASASPYTPEHAASVPTHSPYAQPSSTFDTMSPAPVIPSNTDYPGPHHFEVTFQQSSTAKSATWTYSPLLKKLYCQIAKTCPIQIKVSTPPPPGTAIRAMPVYKKAEHVTDVVKRCPNHELGRDFNEGQSAPASHLIRVEGNNLSQYVDDPVTGRQSVVVPYEPPQVGTEFTTILYNFMCNSSCVGGMNRRPILIIITLEMRDGQVLGRRSFEGRICACPGRDRKADEDHYREQQALNESSAKNGAASKRAFKQSPPAVPALGAGVKKRRHGDEDTYYLQVRGRENFEILMKLKESLELMELVPQPLVDSYRQQQQLLQRPSHLQPPSYGPVLSPMNKVHGGMNKLPSVNQLVGQPPPHSSAATPNLGPVGPGMLNNHGHAVPANGEMSSSHSAQSMVSGSHCTPPPPYHADPSLVSFLTGLGCPNCIEYFTSQGLQSIYHLQNLTIEDLGALKIPEQYRMTIWRGLQDLKQGHDYSTAQQLLRSSNAATISIGGSGELQRQRVMEAVHFRVRHTITIPNRGGPGGGPDEWADFGFDLPDCKARKQPIKEEFTEAEIH

SEQ ID NO: 317 - DNA, 2234 bp, Homo sapiens
aggggacgcagcgaaaccggggcccgcgccaggccagccgggacggacgccgatgcccggggctgcgacggctgcagagcgagctgccctcggaggccggcgtggggaagatggcccagtccaccgccacctcccctgatgggggcaccacgtttgagcacctctggagctctctggaaccagacagcacctacttcgaccttccccagtcaagccgggggaataatgaggtggtgggcggaacggattccagcatggacgtcttccacctggagggcatgactacatctgtcatggcccagttcaatctgctgagcagcaccatggaccagatgagcagccgcgcggcctcggccagcccctacaccccagagcacgccgccagcgtgcccacccactcgccctacgcacaacccagctccaccttcgacaccatgtcgccggcgcctgtcatcccctccaacaccgactaccccggaccccaccactttgaggtcactttccagcagtccagcacggccaagtcagccacctggacgtactccccgctcttgaagaaactctactgccagatcgccaagacatgccccatccagatcaaggtgtccaccccgccacccccaggcactgccatccgggccatgcctgtttacaagaaagcggagcacgtgaccgacgtcgtgaaacgctgccccaaccacgagctcgggagggacttcaacgaaggacagtctgctccagccagccacctcatccgcgtggaaggcaataatctctcgcagtatgtggatgaccctgtcaccggcaggcagagcgtcgtggtgccctatgagccaccacaggtggggacggaattcaccaccatcctgtacaacttcatgtgtaacagcagctgtgtagggggcatgaaccggcggcccatcctcatcatcatcaccctggagatgcgggatgggcaggtgctgggccgccggtcctttgagggccgcatctgcgcctgtcctggccgcgaccgaaaagctgatgaggaccactaccgggagcagcaggccctgaacgagagctccgccaagaacggggccgccagcaagcgtgccttcaagcagagcccccctgccgtccccgcccttggtgccggtgtgaagaagcggcggcatggagacgaggacacgtactaccttcaggtgcgaggccgggagaactttgagatcctgatgaagctgaaagagagcctggagctgatggagttggtgccgcagccactggtggactcctatcggcagcagcagcagctcctacagaggccgagtcacctacagcccccgtcctacgggccggtcctctcgcccatgaacaaggtgcacgggggcatgaacaagctgccctccgtcaaccagctggtgggccagcctcccccgcacagttcggcagctacacccaacctggggcccgtgggccccgggatgctcaacaaccatggccacgcagtgccagccaacggcgagatgagcagcagccacagcgcccagtccatggtctcggggtcccactgcactccgccacccccctaccacgccgaccccagcctcgtcagttttttaacaggattggggtgtccaaactgcatcgagtatttcacctcccaagggttacagagcatttaccacctgcagaacctgaccattgaggacctgggggccctgaagatccccgagcagtaccgcatgaccatctggcggggcctgcaggacctgaagcagggccacgactacagcaccgcgcagcagctgctccgctctagcaacgcggccaccatctccatcggcggctcaggggaactgcagcgccagcgggtcatggaggccgtgcacttccgcgtgcgccacaccatcaccatccccaaccgcggcggcccaggcggcggccctgacgagtgggcggacttcggcttcgacctgcccgactgcaaggcccgcaagcagcccatcaaggaggagttcacggaggccgagatccactgagggcctcgcctggctgcagcctgcgccaccgcccagagacccaagctgcctcccctctccttcctgtgtgtccaaaactgcctcaggaggcaggaccttcgggctgtgcccggggaaaggcaaggtccggcccatccccaggcacctcacaggccccaggaaaggcccagccaccgaagccgcctgtggacagcctgagtcacctgcagaacc

SEQ ID NO: 318 - protein, 732 aa, Homo sapiens
MPEETQTQDQPMEEEEVETFAFQAEIAQLMSLIINTFYSNKEIFLRELISNSSDALDKIRYETLTDPSKLDSGKELHINLIPNKQDRTLTIVDTGIGMTKADLINNLGTIAKSGTKAFMEALQAGADISMIGQFGVGFYSAYLVAEKVTVITKHNDDEQYAWESSAGGSFTVRTDTGEPMGRGTKVILHLKEDQTEYLEERRIKEIVKKHSQFIGYPITLFVEKERDKEVSDDEAEEKEDKEEEKEKEEKESEDKPEIEDVGSDEEEEKKDGDKKKKKKIKEKYIDQEELNKTKPIWTRNPDDITNEEYGEFYKSLTNDWEDHLAVKHFSVEGQLEFRALLFVPRRAPFDLFENRKKKNNIKLYVRRVFIMDNCEELIPEYLNFIRGVVDSEDLPLNISREMLQQSKILKVIRKNLVKKCLELFTELAEDKENYKKFYEQFSKNIKLGIHEDSQNRKKLSELLRYYTSASGDEMVSLKDYCTRMKENQKHIYYITGETKDQVANSAFVERLRKHGLEVIYMIEPIDEYCVQQLKEFEGKTLVSVTKEGLELPEDEEEKKKQEEKKTKFENLCKIMKDILEKKVEKVVVSNRLVTSPCCIVTSTYGWTANMERIMKAQALRDNSTMGYMAAKKHLEINPDHSIIETLRQKAEADKNDKSVKDLVILLYETALLSSGFSLEDPQTHANRIYRMIKLGLGIDEDDPTADDTSAAVTEEMPPLEGDDDTSRMEEVD

SEQ ID NO: 319 - protein, 249 aa, Homo sapiens [sequence omitted]

SEQ ID NO: 320 - DNA, 1313 bp, Homo sapiens
tggtgtggttgactctgaggatctgcccctgaacatctgccgagagatgctccagcagagcaaaatcttgaaagtcattcgcaaaaacattgttaagaagtgccttgagctcttctctgagctggcagaagacaaggagattataagaaattctatgaggcattttctaaaaatctcaagcttggaatccacgaagactccactaaccgccaccgcctgtctgagctgctgcgctgtcacacctcccagtctggagatgagatgacatctctgtcgtagtatgtttctcacatgaaggagacacagaagtccacctattacatcactggtgagagcaaagagcaggtggccaactctgcttttgtggagcgagtgcggaaacagggcttcgaggtggtatatatgactgagcccattgacgagtactgtgtgcagcagctcaaggagtttgatgggaaaagcctggtctcagttaccaaggagggtctggagctacctgaggatgaggaggagaagaagaagatggaagaaagcaaggaaaagtttgagaacctctgcaagctcatgaaagaaatcttagataagaaggttgagaaggtgacaatctccaatagacttgtgtcttcaccctgctgcattgtgaccagcacctacggctggacagccaatatggagcagatcatgaaagcccaggcacttcgggacaactccaccatgggctatatgatggccaaaaagcacctggagatcaaccccgaccaccccatcatggagacgctgcggcagaaggctgaggccgacaagaatgataaggcagttaaggacctggtggtgctgctgtttgaaaccgccctgctatcttcgggcttttcccttgaggatccccagacccactccaaccacatctaccacatgatcaagctaggtctaggtactgatgaagatgaagtggcagcagaggaacccagtgatgcagttcctgatgagatcccccctcttgagggtgatgaggatgcgtctcgcatggaagaagtcgattaggagttcatagttggaaaacttgtgcccttgtatagtgtccccatggctcccactgcagcctcgagtgcccctgtcccacctggctgctggtgtctagtgtttttttccctctcctgtccttgtgttgaaggcaggaaaccaagggtgtcaagccccattccctctctactcttgacagcaggattggatgttgtgtattgtggtttattttattttcttcattttgttctgaaattaaagaatgtaaaataaagaatatgccgtttttatac

SEQ ID NO: 321 - protein, 724 aa, Mus musculus
MPEEVHHGEEEVETFAFQAEIAQLMSLIINTFYSNKEIFLRELISNASDALDKIRYESLTDPSKLDSGKELKIDILPNPQERTLTLVDTGIGMTKADLINNLGTIAKSGTKAFMEALQAGADISMIGQFGVGFYSAYLVAEKVVVITKHNDDEQYAWESSAGGSFTVRADHGEPIGRGTKVILHLKEDQTEYLEERRVKEVVKKHSQFIGYPITLYLEKEREKEISDDEAEEEKGEKEEEDKEDEEKPKIEDVGSDEEDDSGKDKKKKTKKIKEKYIDQEELNKTKPIWTRNPDDITQEEYGEFYKSLTNDWEDHLAVKHFSVEGQLEFRAFLFIPRRAPFDLFENKKKKNNIKLYVRRVFIMDSCDELIPEYLNFIRGVVDSEDLPLNISREMLQQSKILKVIRKNIVKKCLELFSELAEDKENYKKFYEAFSKNLKLGIHEDSTNRRRLSELLRYHTSQSGDEMTSLSEYVSRMKETQKSIYYITGESKEQVANPAFVERVRKRGFEVVYMTEPIDEYCVQQLKEFDGKSLVSVTKEGLELPEDEEEKKKMEESKAKFENLCKLMKEILDKKVEKVTISNRLVSSPCCIVTSTYGWTANMERIMKAQALRDNSTMGYMMAKKHLEINPDHPIVETLRQKAEADKNDKAVKDLVVLLFETALLSSGFSLEDPQTHSNRIYRMIKLGLGIDEDEVTAEEPSAAVPDEIPPLEGDEDASRMEEVD

SEQ ID NO: 322 - protein, 724 aa, Rattus sp.
MPEEVHHGEEEVETFAFQAEIAQLMSLIINTFYSNKEIFLRELISNASDALDKIRYESLTDPSKLDSGKELKIDIIPNPQEATLTLVDTGIGMTKADLINNLGTIAKSGTKAFMEALQAGADISMIGQFGVGFYSAYLVAEKVVVITKHNDDEQYAWESSAGGSFTVRADHGEPIGRGTKVILHLKEDQTEYLEERRVKEVVKKHSQFIGYPITLYLEKEREKEISDDEAEEEKGEKEEEDKEDEEKPKIEDVGSDEEDDSGKDKKKKTKKIKEKYIDQEELNKTKPIWTRNPDDITQEEYGEFYKSLTNDWEDHLAVKHFSVEGQLEFRALLFIPRRAPFDLFENKKKKNNIKLYVRRVFIMDSCDDLIPEYLNFIRGVVDSEDLPLNISREMLQQSKILKVIRKNIVKKCLELFSELAEDKENYKKFYEAFSKNLKLGIHEDSTNRRRLSELLRYHTSQSGDEMTSLSEYVSRMKETQKSIYYITGESKEQVANSAFVERVRKRGFEVVYMTEPIDEYCVQQLKEFDGKSLVSVTKEGLELPEDEEEKKKMEESKARFENLCKLMKEILDKKVEKVTISNRLVSSPCCIVTSTYGWTANMERIMKAQALRDNSTMGYMMAKKHLEINPDHPIVETLRQKAEADKNDKAVKDLVVLLFETALSSLASHFRRPKTHSNRIYRMIKLGLGIDEDEVTAEEPSAAVPDEIPPLEGDEDASRMEEVD

SEQ ID NO: 323 - protein, 733 aa, Cricetulus griseus
MPEETQTQDQPMEEEEVETFAFQAEIAQLMSLIINTFYSNKEIFLRELISNSSDALDKIRYESLTDPSKLDSGKELHINIIPNKQDRTLTIVDTGIGMTKADLINNLGTIAKSGTKAFMEALQAGADISMIGQFGVGFYTAYLVAEKVTVITKHNDDEQYAWESSAGGSFTVRTDTGEPMGRGTKVILHLKEDQTEYMEERRIKEIVKKHSQFIGYPITLFVEKERDKEVSDDEAEEKEDKEEEKEKEEKGIDDKPEIEDVGSDEEEEEKKDGDKKKKKKIKEKYIDQEELNKTKPIWTRNPDDITNEEYGEFYKSLTNDWEEHLAVKHFSVEGQLEFRALLFVPRRAPFDLFENRKKKNNIKLYVRRVFIMDNCEELFPEYLNFIRGVVDSEDLPLNISREILQQSKILKVIRKNLVRKCLELFHELAEDKENYKKFYEQFSKNIKLGIHEDSQNRKKLSELLRYYTSASGDEMVSLKDYCTRMKENQKHIYFITGETKDQVANSAFVERLRKHGLEVIYMIEPIDEYCVQQLKEFEGKTLVSVTKEGLELPEDEEEKKKQEEKKTKFENLCKIMKDILEKKVEKVVVSNRLVTSPCCIVTSTYGWTANMERIIKAQALRDNSTMGYMAAKKHLEINPDHSIIETLRQKAEADKNDKSVKDLVILLYETALLSSGFSLEDPQTHANRIYRMIKLGLGIDEDDPTVDDTSAAVTEEMPPLEGDDDTSRMEEVD

SEQ ID NO: 324 - protein, 725 aa, Gallus gallus
MPEQVQHGEDEVETFAFQAEIAQLMSLIINTFYSNKEIFLRELISNASDALDKIRYESLTDPSKLDTGKDLKIDIVPNPRDPTLTLLDTGIGMTKADLVNNLGTIAKSGTKAFMEALQAGADISMIGQFGVGFYSAYLVAEKVVVITKHNDDEQYAWESSAGGSFTVRTDHGEPIGRGTKVILYLKEDQTEYLEERRVKEVVKKHSQFIGYPITLYVEKEREKEVSDDEAEEEKVEKEEEESKDEEKPKIEDVGSDEEEEEGEKSKKKKTKKIKEKYIDQEELNKTKPIWTRNPDDITQEEYGEFYKSLTNDWEDHLAVKHFSVEGQLEFRALLFIPRRAPFDLFENKKKKNNIKLYVRRVFIMDSCDELIPEYLNFIRGVVDSEDLPLNISREMLQQSKILKVIRKNIVKKCLELFTELAEDKENYKKFYEAFSKNLKLGIHEDSTNRKRLSELLRYHTSQSGDEMTSLSEYVSRMKESQKSIYYITGESKEQVANSAFVERVRKRGFEVVYMTEPIDEYCVQQLKEFDGKTLVSVTKEGLELPEDEEEKKNMEESKAKFETLCKLMKEILDKKVEKVTISNRLVSSPCCIVTSTYGWTANMERIMKAQALRDNSTMGYMMAKKHLEINPDHPIVETLRQKADANKNDKAVKDLVVLLFETALLSSGFSLEDPQTHSNRIYRMIKLGLGIDEDEVIAEESSIAPPDEIPPLEGDEDTSRMEEVD

SEQ ID NO: 325 - protein, 233 aa, Sarcophaga crassipalpis
FGVGFYSAYLVADKVTVTSKHNDDEQYIWESSAGGSFTVKPDSSEPLGRGTKIVLYIKEDQTEYLEESKIKEIVNKHSQFIGYPIKLLVQKERDQEVSDDEAEEEKKEMDTDEPKIEDVGEDEDADKKDKDGKKKKTIKVAYTEDEELNKTKPIWTRNPDDITQAEYGDFYKSLTNDWEDHLAVKHFPLKGQLEFRALLFIPRRTPFDLFENQKKRNNIKLYVPRVFIMDNCE

SEQ ID NO: 326 - protein, 724 aa, Danio rerio
MPEEMRQEEEAETFAFQAEIAQLMSLIINTFYSNKEIFLRELVSNASDALDKIRYESLTDPTKLDSGKDLKIDIIPNVQERTLTLIDTGIGMTKADLINNLGTIAKSGTKAFMEALQAGADISMIGQFGVGFYSAYLVAEKVTVITKHNDDEQYAWESSAGGSFTVKVDHGEPIGRGTKVILHLKEDQTEYIEEKRVKEVVKKHSQFIGYPITLYVEKERDKEISDDEAEEEKAEKEEKEEEGEDKPKIEDVGSDDEEDTKDKDKKKKKKIKEKYIDQEELNKTKPIWTRNPDDISNEEYGEFYKSLTNDWEDHLAVKHFSVEGQLEFRALLFIPRRAPFDLFENKKKKNNIKLYVRRVFIMDNCEELIPEYLNFIRGVVDSEDLPLNISREMLQQSKILKVIRKNIVKKCLELFADVAEDKDNYKKFYDAFSKNLKLGIHEDSQNRRKLSELLRYQSSQSGYEMTSLTEYVSRMKENQKSIYYITGESKDQVAHSAFVERVCKRGFEVLYMTEPIDEYCVQQLKDFDGKSLVSVTKEGLELPEDEDEKKKMEEDKAKFENLCKLMKEILDKKVEKVTVSNRLVSSPCCIVTSTYGWTANMERIMKAQALRDNSTMGYMMAKKHLEINPDHPIMETLRQKAEADKNDKAVKDLVILLFETALLSSGFSLDDPQTHSNRIYRMIKLGLGIDEDEDVPVEEPSSAAPEDIPPLEGDDDASRMEEVD

SEQ ID NO: 327 - protein, 722 aa, Salmo salar
MPEEMRQEEEAETFAFQAEIAQLMSLIINTFYSNKEIFLRELISNASDALDKIRYESLTDPTKLDNGKELKIDVIPNVEERTLTLIDTGIGMTKADLINNLGTIAKSGTKAFMEALQAGADISMIGQFGVGFYSAYLVAERVTVITKHNDDEQYIWESSAGGSFTVKVDTGEPMLRGTKVILHMKEDQTEYVEEKRVKEVVKKHSQFIGYPITLFVEKEREKEISDDEEEKAEEEKEEKEAEDKPKIEDVGSDDEEDSKDKDKKKTKKIKEKYIDQEELNKTKPIWTRNPDDITMEEYGEFYKSLTNDWEEHLAVKHFSVEGQLEFRALLFIPRRAPFDLFENKKKKNNIKLYVRRVFIMDSCEELIPEYLNFVRGVVDSEDLPLNISREMLQQSKILKVIRKNIVKKCMELFGELAEDRENYNKFYDGFSKNLKLGIHEDSQNRKKLSELLRYHSSQSGDELTSLTEYLTRMKDNQKSIYYITGESKDQVANSAFVERVRKRGFEVLYMTEPIDEYCVQQLKEFDGKTLVSVTKEGLELPEDEEEKKKMDEDKTKFENLCKLMKEILDKKVEKVTVSNRLVSSPCCIVTSTYGWTANMERIMKAQALRDNSTMGYMMAKKHLEINPDHPIVETLRQKADLDKNDKAVKDLVILLFETALLSSGFSLDDPQTHSNRIYRMIKLGLGIDDDEVIPEEPTSAPAPDEIPPLEGDDDASRMEEVD

SEQ ID NO: 328 - protein, 733 aa, Sus scrofa
MPEETQTQDQPMEEEEVETFAFQAEIAQLMSLIINTFYSNKEIFLRELISNSSDALDKIRYESLTDPSKLDSGKELHINLIPNKQDRTLTIVDTGIGMTKADLINNLGTIAKSGTKAFMEALQAGADISMIGQFGVGFYSAYLVAEKVTVITKHNDDEQYAWESSAGGSFTVRTDTGEPMGRGTKVILHLKEDQTEYLEERRIKEIVKKHSQFIGYPITLFVEKERDKEVSDDEAEEKEDKEEEKEKEEKESEDKPEIEDVGSDEEEEEKKDGDKKKKKKIKEKYIDQEELNKTKPIWTRNPDDITNEEYGEFYKSLTNDWEDHLAVKHFSVEGQLEFRALLFVPRRAPFDLFENRKKKNNIKLYVRRVFIMDNCEELIPEYLNFIRGVVDSEDLPLNISREMLQQSKILKVIRKNLVKKCLELFTELAEDKENYKKFYEQFSKNIKLGIHEDSQNRKKLSELLRYYTSASGDEMVSLKDYCTRMKENQKHIYYITGETKDQVANSAFVERLRKHGLEVIYMIEPIDEYCVQQLKEFEGKTLVSVTKEGLELPEDEEEKKKQEEKKTKFENLCKIMKDILEKKVEKVVVSNRLVTSPCCIVTSTYGWTANMERIMKAQALRDNSTMGYMAAKKHLEINPDHSIIETLRQKAEADKNDKSVKDLVILLYETALLSSGFSLEDPQTHANRIYRMIKLGLGIDEDDPTADDSSAAVTEEMPPLEGDDDTSRMEEVD

SEQ ID NO: 329 - protein, 709 aa, Saccharomyces cerevisiae [sequence omitted]

SEQ ID NO: 330 - protein, 260 aa, Rana esculenta
EMASLSEYVSRMKETQKSIYYITGESKEQVANSAFVERVRKRGFEVVYMTEPIDEYCVQQLKEFDGKTLVSVTKEGLELPEDDEEKKKMEENKTKFEGLCKLMKEILDKKVEKVTVSNRLVSSPCCIVTSTYGWTANMERIMKAQALRDNSTMGYMMAKKHLEINPEHPIVETLRQKAEADKNDKAVKDLVVLLFETALLSSGFSLDDPQTHSNRIYRMIKLGLGIDEDEPAIEETTAAVPDDIPPLEGEEDASRMEEVD

We claim:

1. A method of treating a patient having a genetically-defined disease characterized by a chromosomal aberration that yields an oncogenic fusion protein, comprising:
providing a cell, tissue, or fluid sample of a patient suspected of having said genetically-defined disease;
identifying one or more characteristics indicative of said disease in or on said cell, tissue, or fluid sample; and
administering to said patient a pharmaceutically effective amount of an HSP90-inhibiting compound.

2. The method of claim 1, wherein said compound is an ansamycin.

3. The method of claim 2, wherein said ansamycin is selected from the group consisting of geldanamycin, 17-AAG, herbimycin A, and macbecin.

4. The method of claim 2, wherein said ansamycin is 17-AAG.

5. The method of claim 1, wherein said compound is a compound that binds into the ATP-binding site of a HSP90.

6. The method of claim 5 wherein said compound is radicicol or an analog thereof.

7. The method of claim 1 wherein said identifying comprises using PCR or LCR to identify a nucleic acid encoding said oncogenic fusion protein.

8. The method of claim 1 wherein said identifying comprises using an antibody to identify said fusion protein.

9. The method of claim 1 wherein said identifying comprises using a cytochemical technique.

10. The method of claim 9 wherein said cytochemical technique employs nucleic acid hybridization.

11. The method of claim 10 wherein said cytochemical technique is FISH.

12. The method of claim 1 wherein said disease is a hematopoietic disorder.

13. The method of claim 11 wherein said hematopoietic disorder is selected from the group consisting of a T or B cell lymphoma, CML, APL, ALL, AML, NHL, and CMML.

14. The method of claim 1 wherein said disease is characterized by a solid tumor.

15. The method of claim 14 wherein said solid tumor is selected from the group consisting of papillary thyroid carcinoma, Ewing's sarcoma, melanoma, liposarcoma, rhabdomyosarcoma, synovial sarcoma.

16. The method of claim 1 wherein said fusion protein contains one or more functional domains or portions thereof selected from the group consisting of kinases and DNA binding motifs.

17. The method of claim 12 or 13 wherein said administering employs an ex vivo procedure.

18. The method of claim 14 wherein said administering is intralesional.

19. The method of claim 1 wherein said administering is parenteral.

20. The method of claim 1 wherein said HSP90-inhibiting compound has an IC₅₀ at least two-fold higher for cells that do not have characteristics indicative of said genetically-defined proliferative disorder relative to those cells that do have such characteristics.

21. The method of claim 1 wherein said HSP90-inhibiting compound has an IC₅₀ at least five-fold higher for cells that do not have characteristics indicative of said genetically-defined proliferative disorder relative to those cells that do have such characteristics.

22. The method of claim 1 wherein said HSP90-inhibiting compound has an IC₅₀ at least ten-fold higher for cells that do not have characteristics indicative of said genetically-defined proliferative disorder relative to those cells that do have such characteristics.

23. The method of claim 1 wherein cells of said patient are monitored in vitro for sensitivity prior to administration of said compound to said patient.

24. The method of claim 1 wherein said non-random chromosomal aberration is a translocation.

25. The method of claim 1 wherein said non-random chromosomal aberration is a inversion.

26. The method of claim 1 wherein said non-random chromosomal aberration is a deletion.

27. The method of claim 1 wherein said non-random chromosomal aberration is selected from the group consisting of inv14 (q11; q32), t(9; 22)(q34; q11), t(1; 19)(q23; p13.3), t(17; 19)(q22; p13), t(15; 17)(q21-q11-22), t(11; 17)(q23; q21), t(4; 11)(q21; q23), t(9; 11)(q21; q23), t(11; 19)(q23; p13), t(X; 11)(q13; q23), t(1; 11)(p32; q23), t(6; 11)(q27; q23), t(11; 17)(q23; q21), t(8; 21)(q22; q22), t(3; 21)(q26; q22), 5(16; 21)(p11; q22), t(6; 9)(p23; q34), t(4; 16)(q26; p13), inv(2; 2)(p13; p11.2-14), inv(16)(p13q22), t(5; 12)(q33; p13), t(2; 5)(2p23; q35), t(9:12)(q34;p13), del(12p), t(15;17)(q22;q12), t(1;17)(q23;q12), t(16:16)(p13;q22), inv(16)(p13;q22), t(9;11)(p22;q23), t(1;22)(p13;q13), t(3;3)(q21;q26), inv(3)(q21q26), t(3;5)(q21;q31), t(3;5)(q25;q34), t(7;11)(p15;p15), t(8;16)(p11;p13), t(9;12)(q34;p13), t(12;22)(p13;q13), del(5q), del(7q), del(20q), t(11q23), t(12;21)(p13;q22), t(5;12)(q31;p13), t(1;12)(q25;p13), t(12;15)(13;q25), t(1;12)(q21;p13), t(12;21)(q13;p32), and t(5;7)(q33;q11.2)).

28. The method of claim 1 wherein said non-random chromosomal aberration is a t(9; 22)(q34; q11) optionally characterized by and comprising a sequence selected from any one of SEQ ID NOs 15-26 or a homolog, isoform, or allelic variation thereof.

29. A method of treating cancerous cells in a heterogeneous population of cells, said heterogeneous population comprising both cancerous and noncancerous, and said cancerous cells characterized by fusion proteins not found in said noncancerous cells, said method comprising:
administering to said heterogeneous population of cells a pharmaceutically effective amount of an HSP90-inhibiting compound.

30. The method of claim 29 wherein said compound has an IC₅₀ that is at least five-fold lower for said cancerous cells than for said noncancerous cells within said heterogeneous population, and wherein said pharmaceutically effective amount administered is about one half or less of the IC₅₀ of said noncancerous cells.

31. The method of claim 29 wherein said compound has an IC₅₀ that is at least ten-fold lower for said cancerous cells than for said noncancerous cells within said heterogeneous population, and wherein said pharmaceutically effective amount administered is about one half or less of the IC₅₀ of said noncancerous cells.

32. The method of any of claims 29-31, wherein said compound is an ansamycin.

33. The method of claim 32, wherein said ansamycin is selected from the group consisting of geldanamycin, 17-AAG, herbimycin A, and macbecin.

34. The method of claim 33, wherein said ansamycin is 17-AAG.

35. The method of any of claims 29-31 wherein said HSP90-inhibiting compound is a compound that binds the ATP-binding site of a HSP90.

36. The method of any of claims 29-31 wherein said cancerous cells are leukemic cells.

37. The method of claim 36 wherein said leukemic cells are selected from the group consisting of a T or B cell lymphoma, CML, APL, ALL, AML, NHL, and CMML.

38. The method of any of claims 29-31 wherein said treatment is monitored using one or more techniques selected from the group consisting of PCR, antibody staining, and nucleic acid hybridization, and wherein said techniques are selective for the presence of cancerous cells.

39. The method of any of claims 29-31 wherein said genetically-defined proliferative disorder is a solid tumor.

40. The method of claim 39 wherein said solid tumor is selected from the group consisting of papillary thyroid carcinoma, Ewing's sarcoma, melanoma, liposarcoma, rhabdomyosarcoma, and synovial sarcoma.

41. The method of any of claims 29-31 wherein said fusion protein contains one or more functional domains selected from the group consisting of kinases and DNA binding motifs.

42. The method of any of claims 29-31 wherein said administering employs an ex vivo procedure.

43. The method of any of claims 29-31 wherein said administering is intralesional.

44. The method of any of claims 29-31 wherein said administering is parenteral.

45. The method of claim 29 wherein said fusion protein arises from a chromosomal translocation.

46. The method of claim 29 wherein said fusion protein arises from a chromosomal inversion.

47. The method of claim 29 wherein said fusion protein arises from a chromosomal deletion.

48. The method of claim 29 wherein said fusion protein is generated from a non-random chromosomal aberration selected from the group consisting of inv14 (q11; q32), t(9; 22)(q34; q11), t(1; 19)(q23; p13.3), t(17; 19)(q22; p13), t(15; 17)(q21-q11-22), t(11; 17)(q23; q21.1), t(4; 11)(q21; q23), t(9; 11)(q21; q23), t(11; 19)(q23; p13), t(X; 11)(q13; q23), t(1; 11)(p32; q23), t(6; 11)(q27; q23), t(11; 17)(q23; q21), t(8; 21)(q22; q22), t(3; 21)(q26; q22), 5(16; 21)(p11; q22), t(6; 9)(p23; q34), t(4; 16)(q26; p13), inv(2; 2)(p13; p11.2-14), inv(16)(p13q22), t(5; 12)(q33; p13), t(2; 5)(2p23; q35), t(9:12)(q34;p13), del(12p), t(15; 17)(q22;q12), t(11;17)(q23;q12), t(16:16)(p13;q22), inv(6)(p13;q22), t(9;11)(p22;q23), t(1;22)(p13;q13), t(3;3)(q21;q26), inv(3)(q21q26), t(3;5)(q21;q31), t(3;5)(q25;q34), t(7;11)(p15;p15), t(8;16)(p11;p13), t(9;12)(q34;p13), t(12;22)(p13;q13), del(5q), del(7q), del(20q), t(11q23), t(12;21)(p13;q22), t(5;12)(q31;p¹³), t(1;12)(q25;p13), t(12;15)(p13;q25), t(1;12)(q21;p13), t(12;21)(q13;p32), and t(5;7)(q33;q11.2)).

49. The method of claim 29 wherein said non-random chromosomal aberration is t(9; 22)(q34; q11).

50. The method of claim 1 or 29 wherein said fusion protein has a heightened dependence on HSP90.

51. The method of claim 20 or 29 wherein said HSP90-inhibiting compound has an IC₅₀ that is lower for cancerous cells than for noncancerous cells.

52. The method of claim 5 or 35 wherein said inhibitor is a synthetic analog of geldanamycin.

53. A method of treating a patient having a proliferative disease associated with a mutant protein or cellular protein isoform dependent on HSP90, comprising:
providing a cell, tissue, or fluid sample of a patient suspected of having said proliferative disease;
identifying in said cell, tissue, or fluid sample one or more characteristics indicative of said mutant protein or cellular protein isoform; and
administering to said patient a pharmaceutically effective amount of an HSP90-inhibiting compound.

54. The method of claim 53 wherein said mutant protein or cellular protein isoform is selected from the group consisting of src; RET, p53, p51, p63, p73, and homologs and allelic variations thereof.

55. The method of claim 53 wherein said mutant protein or cellular protein isoform is a dominant negative mutant.

56. The method of claim 53 wherein said mutant protein or cellular protein isoform is a human p53 selected from the group consisting of N239S, C176R, and R213*, Y236delta, C176Y, M133T, G245D, E258K, 1-293delta, G245C, R248W, E258K, R282W, R175H, R280K, V143A, R175H, P177S, H178P, H179R, R181P, 238-9delta, G245S, G245D, M246R, R248Q, R249S, R273H, R273C, R273L, and D281Y.

57. The method of claim 53 wherein said mutant protein or cellular protein isoform is a dominant positive mutant.

58. The method of claim 57 wherein said mutant protein or cellular protein isoform is a C176Y mutant.

59. The method of claim 53 wherein said patient is heterozygous for said mutant protein or cellular protein isoform.

60. The method of claim 59 wherein said mutant protein or cellular protein isoform is p53 and wherein said proliferative disease is rheumatoid arthritis.

61. The method of claim 53, wherein said compound is an ansamycin.

62. The method of claim 61, wherein said ansamycin is selected from the group consisting of geldanamycin, 17-AAG, herbimycin A, and macbecin.

63. The method of claim 62, wherein said ansamycin is 17-AAG.

64. The method of claim 53, wherein said inhibitor is a compound that binds into the ATP-binding site of a HSP90.

65. The method of claim 64 wherein said compound is radicicol or an analog thereof.

66. The method of claim 53 wherein said identifying comprises using at least one technique selected from the group consisting of nucleic acid hybridization, PCR, LCR, antibody staining, and immunoprecipitation to determine the presence of said mutant protein or cellular protein isoform.

67. The method of claim 53 wherein said administering employs an ex vivo procedure.

68. The method of claim 53 wherein said administering is intralesional.

69. The method of claim 53 wherein said administering is parenteral.

70. The method of claim 53 wherein said HSP90-inhibiting compound has an IC₅₀ at least two-fold higher for cells that do not have characteristics indicative of said mutant protein or cellular protein isoform relative to those cells that do have such characteristics.

71. The method of claim 53 wherein said HSP90-inhibiting compound has an IC₅₀ at least ten-fold higher for cells that do not have characteristics indicative of said mutant protein or cellular protein isoform relative to those cells that do have such characteristics.

72. The method of claim 53 wherein cells of said patient are monitored in vitro for sensitivity prior to administration of said compound to said patient.

73. A method of selectively treating cells that express a mutant protein or cellular protein isoform that gives rise to a proliferative disorder dependent on HSP90, said method comprising:
providing a population of cells in which at least some of said population express a mutant protein or cellular protein isoform that is differentially dependent on HSP90 for effect and gives rise to a proliferative disorder, and
administering to said population a pharmaceutically effective amount of an HSP90-inhibiting compound.

74. The method of claim 73 wherein said compound has an IC₅₀ that is at least five-fold lower for said cells that express said mutant protein or cellular protein isoform than for those cells that do not, and wherein said pharmaceutically effective amount administered is about one half or less of the IC₅₀ of cells that do not express said mutant protein or cellular protein isoform.

75. The method of claim 73 wherein said compound has an IC₅₀ that is at least ten-fold lower for said cells that express said mutant protein or cellular protein isoform than for those cells that do not, and wherein said pharmaceutically effective amount administered is about one half or less of the IC₅₀ of cells that do not express said mutant protein or cellular protein isoform.

76. The method according to any of claims 73-75, wherein said compound is an ansamycin.

77. The method of claim 76, wherein said ansamycin is selected from the group consisting of geldanamycin, 17-AAG, herbimycin A, or macbecin.

78. The method of claim 77, wherein said ansamycin is 17-AAG.

79. The method of any of claims 73-75, wherein said compound is a compound that binds the ATP-binding site of a HSP90.

80. The method of claim 79 wherein said compound is radicicol or an analog thereof.

81. The method of any of claims 73-75 wherein said treatment is monitored using one or more techniques selected from the group consisting of PCR, LCR, nucleic acid hybridization, antibody labeling, and immunoprecipitation, and wherein said techniques are selective for the presence of said mutant protein or cellular protein isoform.

82. The method of any of claims 73-75 wherein said administering employs an ex vivo procedure.

83. The method of any of claims 73-75 wherein said administering is intralesional.

84. The method of any of claims 73-75 wherein said administering is parenteral.

85. The method of claim 76 wherein said HSP90-inhibiting compound has an IC₅₀ that is lower for cells expressing the mutant protein or cellular protein isoform than for cells that do not express said mutant protein or cellular protein isoform.

86. The method of claim 64 or 73 wherein said inhibitor is a synthetic analogue of geldanamycin.

87. The method of claim 73 wherein said mutant protein or cellular protein isoform is selected from the group consisting of src, RET, p53, p51, p63, p73, and homologs and allelic variations thereof.

88. The method of claim 73 wherein said mutant protein or cellular protein isoform is a dominant negative mutant.

89. The method of claim 88 wherein said mutant protein or cellular protein isoform is a human p53 selected from the group consisting of N239S, C176R, and R213*, Y236delta, C174Y, M133T, G245D, E258K, 1-293delta, G245C, R248W, E258K, R282W, R175H, R280K, V143A, R175H, P177S, H178P, H179R, R181P, 238-9delta, G245S, G245D, M246R, R248Q, R249S, R273H, R273C, R273L, and D281Y.

90. The method of claim 73 wherein said mutant protein or cellular protein isoform is a dominant positive mutant.

91. The method of claim 90 wherein said mutant protein or cellular protein isoform is C176Y human p53, or a homolog thereof.

92. The method of claim 73 wherein said cells that express a mutant protein or cellular protein isoform are heterozygous for said mutant protein or cellular protein isoform.

93. The method of claim 92 wherein said mutant protein or cellular protein isoform is p53 and wherein said proliferative disease is rheumatoid arthritis or a cancer.
